(19) United States
(12) Patent Application Publication
(10) Pub. No.: US 2008/0102520 A1
(43) Pub. Date: May 1, 2008

(54) Novel human membrane proteins and polynucleotides encoding the same

(76) Inventors: Alejandro Abuin, The Woodlands, TX (US); Michael B. Burnett, Houston, TX (US); Emily B. Cullinan, The Woodlands, TX (US); Gregory Donoho, Indianapolis, IN (US); Dorit B. Donoviel, The Woodlands, TX (US); Carl Johan Friddle, The Woodlands, TX (US); Glenn Friedrich, Houston, TX (US); Brenda Gerhardt, Spring, TX (US); Erin Hilbun, Denton, TX (US); Yi Hu, Spring, TX (US); Brian Mathur, Nashville, TN (US); Maricar Miranda, The Woodlands, TX (US); Michael C. Nehls, Stockdorf (DE); Boris Nepomnichy, Dickinson, TX (US); David George Potter, The Woodlands, TX (US); David Reed Powell, Houston, TX (US); Arthur T. Sands, The Woodlands, TX (US); John Scoville, Pearland, TX (US); Hong Sun, Bellevue, WA (US); C. Alexander Turner, The Woodlands, TX (US); D. Wade Walke, Spring, TX (US); Frank Wattler, Muensing (DE); Nathaniel L. Wilganowski, Spring, TX (US); Xuanchuan Yu, Conroe, TX (US); Brian Zambrowicz, The Woodlands, TX (US)

Correspondence Address: LEXICON PHARMACEUTICALS, INC., 8800 TECHNOLOGY FOREST PLACE, THE WOODLANDS, TX, 77381-1160, US

(21) Appl. No.: 11/356,592

(22) Filed: Feb. 17, 2006

Related U.S. Application Data
(63) Continuation-in-part of application No. 11/196,524, filed on Aug. 3, 2005, now abandoned.
Application No. 11/196,524 is a division of application No. 10/165,813, filed on Jun. 7, 2002, now Pat. No. 6,987,178.
Application No. 10/165,813 is a continuation of application No. 09/501,558, filed on Feb. 9, 2000, now Pat. No. 6,403,784.
(60) Provisional application No. 60/158,458, filed on Oct. 8, 1999.
(60) Provisional application No. 60/119,228, filed on Feb. 9, 1999.

(51) Int. Cl. C12N 15/64; C07H 21/04; C07K 16/44

(52) U.S. Cl. 435/320.1; 530/387.9; 536/23.1; 536/24.5

(57) ABSTRACT

Novel human polynucleotide and polypeptide sequences are disclosed that can be used in therapeutic, diagnostic, and pharmacogenomic applications.

### 1.0 CROSS-REFERENCE TO RELATED APPLICATIONS

[0001] The present application is a continuation-in-part of: co-pending U.S. application Ser. No. 11/196,524, filed on Aug. 3, 2005, which is a divisional of U.S. application Ser. No. 10/165,813, filed on Jun. 7, 2002, which issued as U.S. Pat. No. 6,987,178 B2 on Jan. 17, 2006, which is a continuation of U.S. application Ser. No. 09/501,558, filed on Feb. 9, 2000, which issued as U.S. Pat. No. 6,403,784 B1 on Jun. 11, 2002, which claims the benefit of U.S. Provisional Application Nos. 60/158,458, filed on Oct. 8, 1999, and 60/119,228, filed Feb. 9, 1999; co-pending U.S. application Ser. No. 10/900,742, filed on Jul. 28, 2004, which is a continuation of U.S. application Ser. No. 09/710,098, filed on Nov. 10, 2000, abandoned, which claims the benefit of U.S. Provisional Application No. 60/165,263, filed on Nov. 12, 1999; co-pending U.S. application Ser. No. 11/023,060, filed on Dec. 27, 2004, which is a continuation of U.S. application Ser. No. 09/714,882, filed on Nov. 16, 2000, abandoned, which claims the benefit of U.S. Provisional Application No. 60/165,959, filed on Nov. 17, 1999; co-pending U.S. application Ser. No. 11/179,018, filed on Jul. 11, 2005, which is a continuation of U.S. application Ser. No. 09/735,712, filed on Dec. 12, 2000, abandoned, which claims the benefit of U.S. Provisional Application No. 60/171,567, filed on Dec. 22, 1999; co-pending U.S. application Ser. No. 10/942,745, filed on Sep. 16, 2004, which is a continuation of U.S. application Ser. No. 09/771,961, filed on Jan. 29, 2001, abandoned, which claims the benefit of U.S. Provisional Application No. 60/179,001, filed on Jan. 28, 2000; co-pending U.S. application Ser. No. 10/999,233, filed on Nov. 29, 2004, which is a continuation of U.S. application Ser. No. 09/770,643, filed on Jan. 26, 2001, abandoned, which claims the benefit of U.S. Provisional Application Nos. 60/199,513, filed on Apr. 25, 2000, and 60/178,557, filed on Jan. 26, 2000; co-pending U.S. application Ser. No. 11/188,353, filed on Jul. 25, 2005, which is a continuation of U.S. application Ser. No. 10/436,356, filed on May 12, 2003, abandoned, which is a continuation of U.S. application Ser. No. 09/765,069, filed on Jan. 18, 2001, which issued as U.S. Pat. No. 6,586,582 B2 on Jul. 1, 2003, which claims the benefit of U.S. Provisional Application No. 60/176,692, filed on Jan. 18, 2000; co-pending U.S. application Ser. No. 10/862,060, filed on Jun. 4, 2004, which is a continuation of U.S. application Ser. No. 09/822,807, filed on Mar. 30, 2001, abandoned, which claims the benefit of U.S. Provisional Application No. 60/193,336, filed on Mar. 30, 2000; co-pending U.S. application Ser. No. 10/843,132, filed on May 11, 2004, which is a continuation of U.S. application Ser. No. 09/870,113, filed on May 30, 2001, which issued as U.S. Pat. No. 6,790,667 B1 on Sep. 14, 2004, which claims the benefit of U.S. Provisional Application No. 60/207,933, filed on May 30, 2000; co-pending U.S. application Ser. No. 10/901,909, filed on Jul. 29, 2004, which is a continuation of U.S. application Ser. No. 09/876,858, filed on Jun. 7, 2001, abandoned, which claims the benefit of U.S. Provisional Application No. 60/210,271, filed on Jun. 8, 2000; co-pending U.S. application Ser. No. 09/893,321, filed on Jun. 27, 2001, which claims the benefit of U.S. Provisional Application No. 60/214,083, filed on Jun. 27, 2000; co-pending U.S. application Ser. No. 10/925,362, filed on Aug. 24, 2004, which is a continuation of U.S. application Ser. No. 09/939,512, filed on Aug. 24, 2001, abandoned, which claims the benefit of U.S. Provisional Application Nos. 60/231,044, filed on Sep. 8, 2000, and 60/227,754, filed on Aug. 24, 2000; co-pending U.S. application Ser. No. 10/798,721, filed on Mar. 11, 2004, which is a continuation of U.S. application Ser. No. 09/969,532, filed on Oct. 2, 2001, which issued as U.S. Pat. No. 6,777,232 B1 on Aug. 17, 2004, which claims the benefit of U.S. Provisional Application No. 60/237,280, filed on Oct. 2, 2000; co-pending U.S. application Ser. No. 11/264,289, filed on Oct. 31, 2005, which is a continuation of co-pending U.S. application Ser. No. 09/981,318, filed on Oct. 17, 2001, which claims the benefit of U.S. Provisional Application No. 60/241,194, filed on Oct. 17, 2000; co-pending U.S. application Ser. No. 10/917,242, filed on Aug. 12, 2004, which is a divisional of U.S. application Ser. No. 10/025,225, filed on Dec. 19, 2001, which issued as U.S. Pat. No. 6,852,844 B1 on Feb. 8, 2005, which claims the benefit of U.S. Provisional Application No. 60/257,257, filed on Dec. 20, 2000; co-pending U.S. application Ser. No. 10/885,484, filed on Jul. 6, 2004, which is a continuation of U.S. application Ser. No. 10/067,162, filed on Feb. 4, 2002, abandoned, which claims the benefit of U.S. Provisional Application No. 60/266,739, filed on Feb. 6, 2001; co-pending U.S. application Ser. No. 10/859,039, filed on Jun. 1, 2004, which is a continuation of U.S. application Ser. No. 10/079,267, filed on Feb. 19, 2002, abandoned, which claims the benefit of U.S. Provisional Application No. 60/271,335, filed on Feb. 23, 2001; co-pending U.S. application Ser. No. 10/090,466, filed on Mar. 1, 2002, which claims the benefit of U.S. Provisional Application No. 60/274,961, filed on Mar. 12, 2001; co-pending U.S. application Ser. No. 11/230,321, filed on Sep. 19, 2005, which is a divisional of U.S. application Ser. No. 10/094,162, filed on Mar. 6, 2002, which issued as U.S. Pat. No. 6,994,995 B1 on Feb. 7, 2006, which claims the benefit of U.S. Provisional Application No. 60/276,594, filed on Mar. 16, 2001; co-pending U.S. application Ser. No. 11/135,604, filed on May 23, 2005, which is a continuation of U.S. application Ser. No. 10/132,089, filed on Apr. 24, 2002, abandoned, which claims the benefit of U.S. Provisional Application No. 60/287,641, filed on Apr. 30, 2001; co-pending U.S. application Ser. No. 10/990,763, filed on Nov. 17, 2004, which is a continuation of U.S. application Ser. No. 10/123,962, filed on Apr. 16, 2002, abandoned, which claims the benefit of U.S. Provisional Application No. 60/286,141, filed on Apr. 24, 2001; co-pending U.S. application Ser. No. 10/160,567, filed on May 31, 2002, which claims the benefit of U.S. Provisional Application No. 60/294,882, filed on May 31, 2001; co-pending U.S. application Ser. No. 10/223,667, filed on Aug. 16, 2002, which claims the benefit of U.S. Provisional Application No. 60/312,939, filed on Aug. 16, 2001; and co-pending U.S. application Ser. No. 10/225,544, filed on Aug. 21, 2002, which claims the benefit of U.S. Provisional Application No. 60/313,876, filed on Aug. 21, 2001; each of which is herein incorporated by reference in its entirety.

### 2.0 CROSS-REFERENCE TO SEQUENCE LISTING SUBMITTED ON COMPACT DISC

[0002] The present application contains a Sequence Listing of SEQ ID NOS:1-270, in file “FINALseqlist.txt” (2,086,912 bytes), created on Feb. 16, 2006, submitted herewith on duplicate compact disc (Copy 1 and Copy 2), which is herein incorporated by reference in its entirety.

### 3.0 INTRODUCTION

[0003] The present invention relates to the discovery, identification, and characterization of novel human polynucleotides encoding proteins that share sequence similarity with mammalian membrane proteins. The invention encompasses the described polynucleotides, host cell expression systems, the encoded proteins, fusion proteins, polypeptides and peptides, antibodies to the encoded proteins and peptides, and genetically engineered animals that either lack or overexpress the disclosed polynucleotides, antagonists and agonists of the proteins, and other compounds that modulate the expression or activity of the proteins encoded by the disclosed polynucleotides, which can be used for diagnosis, drug screening, clinical trial monitoring, the treatment of diseases and disorders, and cosmetic or nutriceutical applications.

### 4.0 BACKGROUND OF THE INVENTION

[0004] In addition to providing the structural and mechanical scaffolding for cells and tissues, membrane proteins also mediate a variety of regulatory and housekeeping functions within the cell, and can also serve as receptors, recognition or cell surface markers, mediate cell-cell interactions, mediate signal transduction, and can mediate or facilitate the passage of materials across the lipid bilayer.

[0005] Many proteins present in the mitochondria are encoded within the nucleus. Uncoupling proteins (UCPs) are one example of such nuclear encoded mitochondrial proteins. In the mitochondria, nuclear encoded mitochondrial proteins are involved in, or regulate, the gradient that drives energy production in the cell/body. UCPs uncouple this gradient. As such, nuclear encoded mitochondrial proteins, including, but not limited to, UCPs, effectively modulate the efficiency of energy production in the body, and hence body metabolism. Given the role of nuclear encoded mitochondrial proteins, including UCPs, in the body, they are thought to be important targets for the study of obesity, cachexia, thermogenesis, and other metabolically related physiological functions, diseases, and disorders.

[0006] Transporter proteins are integral membrane proteins that mediate or facilitate the passage of materials across the lipid bilayer. Given that the transport of materials across the membrane can play an important physiological role, transporter proteins are good drug targets. Additionally, one of the mechanisms of drug resistance involves diseased cells using cellular transporter systems to export chemotherapeutic agents from the cell. Such mechanisms are particularly relevant to cells manifesting resistance to a multiplicity of drugs.

[0007] SEL-1 proteins are negative regulators of Notch family receptors. Notch receptors and their associated signaling pathways have been associated with development, apoptosis, neuron growth and maintenance. Genetic alterations in Notch receptors and their ligands have been associated with multiple human processes and disorders, such as diabetes, cancer (inter alia pancreatic cancer and insulinomas), stroke, Alzheimer's, and other neurodegenerative diseases, cholesterol and fat metabolism (HMG CoA reductase degradation), blood pressure abnormalities, coronary artery disease, and immunity (see, e.g., PCT Patent Application Serial No. PCT/CA98/01058, Publication No. WO 99/27088).

[0008] Neurexins have been associated with, inter alia, mediating neural processes, seizures, signaling, exocytosis, cancer, and development. Neurexins can also serve as receptors for latrotoxins. Semaphorins are proteins that have been implicated in a number of biological processes and anomalies such as neural development, paralysis, and axon guidance. Cadherin proteins are membrane proteins that have been linked to a variety of biological processes varying from development, tumor suppression, neural function, and cell communication. Synaptotagmins are a family of proteins that have been implicated in membrane traffic and calcium dependent neuroexocytosis.

[0009] The kidney is a primary organ for the ultra filtration of blood and plasma in the human body. To effect such ultra filtration, the kidney employs a plurality of glomeruli that each in turn incorporate a fenestrated endothelial layer over a basement membrane. The glomeruli collectively constitute a size-selective molecular sieve that can respond to or regulate a variety of chemical and physiological equilibria in the body. Given the critical importance of kidney function in mammals, the kidney, and its related disorders has been subject to intensive medical scrutiny.

[0010] Sensory receptor proteins are typically membrane proteins that interact with ligands or stimuli and mediate signal transduction. The IgE receptor plays a role in the activation and release of agents that mediate a variety of allergic and inflammatory reactions. GABA receptors bind potent inhibitory neurotransmitters and this interaction serves as a target for a variety of pharmaceutically active agents such as benzodiazepines, barbiturates, and alcohol.

[0011] Therefore, membrane proteins constitute ideal targets for drug intervention and for the design of therapeutic agents.

### 5.0 SUMMARY OF THE INVENTION

[0012] The present invention relates to the discovery, identification, and characterization of nucleotides that encode novel human membrane proteins and the corresponding amino acid sequences of these proteins. The novel human membrane proteins, described for the first time herein, share structural similarity with: mammalian uncoupling proteins and brain mitochondrial carrier proteins (SEQ ID NOS:1-4); mammalian class III MHC membrane receptor proteins, and membrane receptors such as, but not limited to, MHC and HLA proteins (SEQ ID NOS:5-8); animal Notch ligands, and particularly SEL-1 (SEQ ID NOS:9-22); membrane receptors such as, but not limited to, the IgE receptor and mammalian CD20 (SEQ ID NOS:23-31); membrane receptors such as, but not limited to, mammalian CD82 and CD37 (SEQ ID NOS:32-35); animal neurexin proteins (including secreted types) and contactin associated proteins (SEQ ID NOS:36-62); mammalian gamma-amino butyric acid (GABA) receptor subunits, and particularly rho 3 subunits of the GABA receptor (SEQ ID NOS:63-74); mammalian proteins that are induced in response to viral infection and hormone or cytokine stimulation, and proteins expressed in the central nervous system (SEQ ID NOS:75-91); mammalian mitochondrial proteins that are encoded in the nucleus, such as mitochondrial solute carriers, RNA splicing proteins, uncoupling proteins, and mitochondrial carrier proteins (SEQ ID NOS:92-103); human nephrin, and animal titin, robo, and irregular chiasm C-roughest precursor (SEQ ID NOS:104-107); human and other mammalian GABA receptor subunits, and particularly GABA A receptor gamma-1, -2, -3, -4, -5, and -6 subunits (SEQ ID NOS:108-112); mammalian neurexins, agrin, notch proteins, and proteins having EGF domains (SEQ ID NOS:113-124); mammalian protein and peptide receptors, and particularly proteins of the Unc5 family, which are putative netrin receptors (SEQ ID NOS:125-157); animal semaphorin proteins (SEQ ID NOS:158-192); animal cadherin and protocadherin proteins, especially the protocadherin FAT (SEQ ID NOS:193-200); mammalian membrane proteins, and particularly ion channel/transporter proteins of the phospholemman family (SEQ ID NOS:201-203); mammalian membrane proteins (SEQ ID NOS:204 and 205); mammalian proteins having structural domains in common with proteins of the immunoglobulin (Ig) super family, and proteins of the Ig Fc receptor family, which are often found on the cell surface and can be exploited by human pathogens to gain entry to the cell (SEQ ID NOS:206-214); mammalian proteins having structural domains in common with proteins of the dectin family, which are typically integral membrane proteins exhibiting pectin/ligand binding domains (SEQ ID NOS:215-218); animal synaptotagmins, in particular synaptotagmin 2, a calcium binding/sensing protein that is present on synaptic vesicles (SEQ ID NOS:219-221); mammalian transporters, such as those involved in multi-drug resistance (MDR), and particularly nuclear importins, which allow selective protein import into the cell nucleus (SEQ ID NOS:222-228); mammalian proteins of the epidermal growth factor (EGF) family, stabilin, and notch proteins (SEQ ID NOS:229-233); mammalian proteins having structural domains in common with animal tectorin and uromodulin proteins (SEQ ID NOS:234-236); mammalian proteins of the MUNC family (mammalian homologs of worm unc proteins, which are essential for presynaptic function in worms), and particularly MUNC-13, which have been implicated in neural development and function (SEQ ID NOS:237-240); animal proteins of the cadherin family, and closely resemble the Drosophila tumor suppressor FAT (SEQ ID NOS:241-262); and mammalian growth factor receptors and plexins (SEQ ID NOS:263-270).

[0013] The novel human nucleic acid sequences described herein (SEQ ID NOS:1, 3, 5, 7, 9, 11, 13, 15, 17, 19, 21, 23, 25, 27, 29, 32, 34, 36, 38, 40, 42, 44, 46, 48, 50, 52, 54, 56, 58, 60, 63, 65, 67, 69, 71, 73, 75, 77, 79, 81, 83, 85, 87, 89, 92, 94, 96, 98, 100, 102, 104, 106, 108, 110, 113, 115, 118, 120, 122, 125, 127, 129, 131, 133, 135, 137, 139, 141, 143, 145, 147, 149, 151, 153, 155, 158, 160, 162, 164, 166, 168, 170, 172, 174, 176, 178, 180, 182, 184, 186, 188, 190, 193, 195, 197, 199, 201, 204, 206, 208, 210, 212, 215, 217, 219, 222, 224, 226, 229, 231, 234, 237, 239, 241, 243, 245, 247, 249, 251, 253, 255, 257, 259, 261, 263, 265, 267, and 269) encode alternative proteins/open reading frames (ORFs) of 291, 293, 585, 584, 689, 688, 590, 418, 499, 576, 575, 199, 81, 138, 149, 248, 211, 1307, 1259, 35, 250, 279, 582, 534, 745, 697, 839, 791, 1298, 1175, 467, 392, 180, 420, 345, 133, 513, 690, 477, 654, 379, 556, 343, 520, 364, 193, 230, 265, 94, 131, 605, 403, 465, 256, 1009, 152, 285, 154, 134, 577, 566, 563, 552, 911, 900, 897, 886, 346, 335, 332, 321, 680, 669, 666, 655, 767, 1047, 1062, 838, 1150, 863, 1158, 890, 1185, 714, 994, 1009, 785, 1097, 810, 1105, 1132, 4589, 3852, 4585, 4588, 95, 504, 426, 462, 203, 239, 213, 182, 419, 516, 532, 537, 1986, 2017, 415, 1971, 764, 885, 854, 231, 613, 860, 693, 829, 588, 443, 662, 668, 3035, 2033, 699, and 1776 amino acids in length (SEQ ID NOS:2, 4, 6, 8, 10, 12, 14, 16, 18, 20, 22, 24, 26, 28, 30, 33, 35, 37, 39, 41, 43, 45, 47, 49, 51, 53, 55, 57, 59, 61, 64, 66, 68, 70, 72, 74, 76, 78, 80, 82, 84, 86, 88, 90, 93, 95, 97, 99, 101, 103, 105, 107, 109, 111, 114, 116, 119, 121, 123, 126, 128, 130, 132, 134, 136, 138, 140, 142, 144, 146, 148, 150, 152, 154, 156, 159, 161, 163, 165, 167, 169, 171, 173, 175, 177, 179, 181, 183, 185, 187, 189, 191, 194, 196, 198, 200, 202, 205, 207, 209, 211, 213, 216, 218, 220, 223, 225, 227, 230, 232, 235, 238, 240, 242, 244, 246, 248, 250, 252, 254, 256, 258, 260, 262, 264, 266, 268, and 270, respectively). SEQ ID NOS:31, 62, 91, 112, 117, 124, 157, 192, 203, 214, 221, 228, 233, and 236 describe full length ORFs, as well as flanking 5′ and 3′ sequences.

[0014] The invention also encompasses agonists and antagonists of the described membrane proteins, including small molecules, large molecules, mutant membrane proteins, or portions thereof, that compete with native membrane proteins, peptides, and antibodies, as well as nucleotide sequences that can be used to inhibit the expression of the described membrane proteins (e.g., antisense and ribozyme molecules, and open reading frame or regulatory sequence replacement constructs) or to enhance the expression of the described membrane proteins (e.g., expression constructs that place the described polynucleotide under the control of a strong promoter system), and transgenic animals that express a membrane protein sequence, or “knock-outs” (which can be conditional) that do not express a functional membrane protein.

[0015] Murine homologs of many of the described human membrane proteins have been identified, and “knockout” ES cell lines have been produced using the methods such as those described in U.S. Pat. Nos. 6,136,566, 6,139,833, and 6,207,371, U.S. patent application Ser. No. 08/728,963, and “Mouse Mutagenesis” (Zambrowicz et al., eds., Lexicon Press, The Woodlands, Tex., 1998), and periodic updates thereof. Knock-out mice can be produced in several ways, one of which involves the use of mouse embryonic stem cell (“ES cell”) lines that contain gene trap mutations in a murine homolog of at least one of the described membrane proteins. Alternatively, such knock-out cells and animals can be produced using conventional methods for generating genetically engineered animals and cells (see, e.g., PCT Patent Application Serial No. PCT/US98/03243, Publication Number WO 98/37175). When the unique membrane protein sequences described in SEQ ID NOS:1-270 are “knocked-out” they provide a method of identifying phenotypic expression of the particular gene, as well as a method of assigning function to previously unknown genes. For example, knock-out mice corresponding to the murine homolog of SEQ ID NOS:104-107 have been produced that display profound developmental abnormalities in the kidney, and knock-out mice corresponding to the murine homolog of SEQ ID NOS:158-192 demonstrated a decrease in body-weight as compared to control wild-type mice, with no additional phenotypic alterations observed. In addition, animals in which the unique membrane protein sequences described in SEQ ID NOS:1-270 are “knocked-out” provide an unique source in which to elicit antibodies to homologous and orthologous proteins, which would have been previously viewed by the immune system as “self” and therefore would have failed to elicit significant antibody responses.

[0016] Additionally, the unique membrane protein sequences described in SEQ ID NOS:1-270 are useful for the identification of protein coding sequences, and mapping an unique gene to a particular chromosome. These sequences identify biologically verified exon splice junctions, as opposed to splice junctions that may have been bioinformatically predicted from genomic sequence alone. The sequences of the present invention are also useful as additional DNA markers for restriction fragment length polymorphism (RFLP) analysis, and in forensic biology, particularly given the presence of nucleotide polymorphisms within the described sequences.

[0017] Further, the present invention also relates to processes for identifying compounds that modulate, i.e., act as agonists or antagonists of, membrane protein expression and/or membrane protein activity that utilize purified preparations of the described membrane proteins and/or membrane protein products, or cells expressing the same. Such compounds can be used as therapeutic agents for the treatment of any of a wide variety of symptoms associated with biological disorders or imbalances.

### 6.0 BRIEF DESCRIPTION OF THE FIGURES

[0018] No Figures are required in the present invention.

### 7.0 DETAILED DESCRIPTION OF THE INVENTION

[0019] The membrane proteins described for the first time herein are novel proteins that can be found expressed in, inter alia, human cell lines, and: human cerebellum, spinal cord, thymus, spleen, lymph node, bone marrow, trachea, lung, kidney, fetal liver, prostate, testis, thyroid, salivary gland, stomach, heart, uterus, and mammary gland cells, with particularly strong expression in human kidney, adrenal gland, heart, and skeletal muscle cells (SEQ ID NOS:1-4); human kidney, bone marrow, adrenal, trachea, brain, pancreas, mammary gland, placenta, prostate, thymus, liver, lymph node, and testis cells (SEQ ID NOS:5-8); human testis cells (SEQ ID NOS:9-31); human trachea, prostate, testis, thyroid, salivary gland, small intestine, skeletal muscle, heart, uterus, mammary gland, adipose, esophagus, cervix, pericardium, hypothalamus, ovary, and fetal lung cells (SEQ ID NOS:32-35); human fetal brain, brain, cerebellum, testis, adrenal-gland, spinal cord, small intestine, and hypothalamus cells (SEQ ID NOS:36-62); human testis, brain, and adrenal gland cells (SEQ ID NOS:63-74); human fetal brain, brain, pituitary, cerebellum, spinal cord, lymph node, testis, thyroid, pancreas, and hypothalamus cells, and predominantly expressed in the central nervous system (SEQ ID NOS:75-91); human fetal brain, pituitary, trachea, lung, salivary gland, and fetal kidney cells (SEQ ID NOS:92-103); human fetal kidney and adipose cells (SEQ ID NOS:104-107); human brain, pituitary, cerebellum, lymph node, adipose, esophagus, cervix, rectum, pericardium, and hypothalamus cells (SEQ ID NOS:108-112); human spinal cord, spleen, lymph node, bone marrow, trachea, lung, kidney, fetal liver, prostate, testis, thyroid, adrenal gland, salivary gland, stomach, small intestine, colon, heart, uterus, placenta, mammary gland, adipose, esophagus, bladder, cervix, pericardium, ovary, fetal kidney, and fetal lung cells (SEQ ID NOS:113-117); human fetal brain, brain, pituitary, cerebellum, spinal cord, thymus, spleen, lymph node, bone marrow, trachea, lung, kidney, fetal liver, liver, prostate, testis, thyroid, adrenal gland, pancreas, salivary gland, stomach, small intestine, colon, skeletal muscle, heart, uterus, placenta, mammary gland, adipose, skin, esophagus, bladder, cervix, rectum, pericardium, fetal kidney, and fetal lung cells (SEQ ID NOS:118-124); human fetal brain, brain, pituitary, cerebellum, spinal cord, thymus, kidney, prostate, testis, adrenal gland, stomach, small intestine, mammary gland, esophagus, bladder, cervix, pericardium, and fetal kidney cells (SEQ ID NOS:125-157); human fetal brain, brain, pituitary, spinal cord, spleen, lymph node, bone marrow, lung, kidney, fetal liver, prostate, adrenal gland, pancreas, salivary gland, stomach, small intestine, colon, placenta, skin, bladder, cervix, pericardium, ovary, fetal lung, fetal kidney, and fetal lung cells (SEQ ID NOS:158-192); human fetal brain, brain, pituitary, cerebellum, fetal kidney, fetal lung, and 6- and 9-week embryo cells (SEQ ID NOS:193-200); human fetal brain, cerebellum, thymus, spleen, bone marrow, lymph node, trachea, kidney, fetal liver, prostate, testis, thyroid, adrenal gland, pancreas, skeletal muscle, uterus, bladder, cervix, fetal kidney, fetal lung, gall bladder, 6- and 9-week old embryo, adenocarcinoma, osteosarcoma, and embryonic carcinoma cells (SEQ ID NOS:201-203); human pituitary, spinal cord, bone marrow, lymph node, prostate, thyroid, adrenal gland, salivary gland, stomach, small intestine, skeletal muscle, uterus, placenta, mammary gland, bladder, rectum, pericardium, fetal kidney, fetal lung, tongue, 6-, 9-, and 12-week old embryo, adenocarcinoma, osteosarcoma, embryonic carcinoma, and normal umbilical vein cells (SEQ ID NOS:204 and 205); human lymph node, fetal kidney, and fetal lung cells (SEQ ID NOS:206-214); human lymph node, bone marrow, testis, fetal kidney, fetal lung, and embryonic carcinoma cells (SEQ ID NOS:215-218); human fetal brain, cerebellum, spinal cord, lymph node, testis, small intestine, esophagus, hypothalamus, ovary, fetal kidney, fetal lung, and 6- and 9-week old embryo cells (SEQ ID NOS:219-221); human fetal brain, spinal cord, thymus, spleen, lymph node, bone marrow, trachea, lung, kidney, fetal liver, liver, prostate, testis, thyroid, adrenal gland, pancreas, salivary gland, stomach, small intestine, colon, skeletal muscle, uterus, placenta, mammary gland, esophagus, bladder, cervix, rectum, pericardium, hypothalamus, ovary, fetal kidney, fetal lung, gall bladder, tongue, aorta, 6-, 9-, and 12-week embryo, osteosarcoma, and embryonic carcinoma cells (SEQ ID NOS:222-228); human spleen, lymph node, bone marrow, trachea, lung, kidney, fetal liver, liver, testis, thyroid, adrenal gland, pancreas, stomach, small intestine, colon, skeletal muscle, heart, uterus, placenta, mammary gland, adipose, esophagus, bladder, cervix, rectum, pericardium, ovary, fetal kidney, fetal lung, gall bladder, aorta, and 6-, 9-, and 12-week old embryo cells (SEQ ID NOS:229-233); human cervix, rectum, kidney, testis, fetal kidney, and fetal lung cells (SEQ ID NOS:234-236); human fetal brain, brain, cerebellum, spinal cord, lymph node, bone marrow, trachea, lung, kidney, fetal liver, prostate, testis, thyroid, adrenal gland, pancreas, salivary gland, stomach, small intestine, colon, skeletal muscle, uterus, placenta, mammary gland, adipose, esophagus, bladder, cervix, rectum, pericardium, hypothalamus, fetal kidney, fetal lung, gall bladder, tongue, aorta, 6-, 9-, and 12-week old embryo, umbilical vein, and osteosarcoma cells (SEQ ID NOS:237-240); human fetal brain, brain, cerebellum, spinal cord, lymph node, trachea, lung, kidney, fetal liver, liver, prostate, testis, thyroid, adrenal gland, stomach, small intestine, colon, uterus, placenta, mammary gland, esophagus, bladder, cervix, ovary, fetal kidney, fetal lung, 6-, 9-, and 12-week embryo, and osteosarcoma cells (SEQ ID NOS:241-262); and human lymph node, trachea, and thymus cells (SEQ ID NOS:263-270).

[0020] Mitochondrial proteins that are encoded in the nucleus, including, but not limited to, UCPs, exert biological effect by regulating the efficiency of energy generation in the body, with the result being that excess resources are converted to heat or are otherwise stored as fat, etc. Regulating the function of such nuclear-encoded mitochondrial proteins will effect processes mediated by such proteins, with resulting effects on fat production and usage, superoxide generation and regulation, and all biological properties and functions that are tied to fatty acid metabolism. Because of these important roles, mitochondrial proteins that are encoded in the nucleus, including, but not limited to, UCPs, have been the focus of intense scientific scrutiny (see, e.g., PCT Patent Application Serial No. PCT/EP98/02645, and U.S. Pat. Nos. 5,853,975, 5,741,666 and 5,702,902, which describe a variety of uses, assays, and applications that can be applied to the presently described mitochondrial proteins).

[0021] Because of the diverse activities that have been associated with Notch signaling pathways, Notch receptors, and their associated ligands and antagonists, have been subject to intense scientific scrutiny (see, e.g., U.S. Pat. Nos. 5,786,158, 5,780,300, and 5,856,441). These patents provide examples of how the described Notch receptors and ligands can be produced, antagonized, used, processed, applied, and delivered. Given their structural relatedness, the described Notch ligand-like proteins are suitable for use and modification as contemplated for other Notch ligands and antagonists.

[0022] Given their structural relatedness, and the similarity of the four transmembrane regions, the described CD-like proteins are suitable for uses and applications previously described for similar proteins (see, e.g., U.S. Pat. Nos. 5,977,072 and 5,863,735).

[0023] Because of their medical relevance, GABA receptors have been subject to considerable scientific scrutiny, as evidenced by U.S. Pat. No. 6,043,054 (corresponding to PCT Patent Application No. PCT/US99/02904, Publication No. WO 99/42580 A2), which describes a variety of uses, assays, and applications that can be applied to the presently described GABA receptor subunit proteins.

[0024] Because of their important role in mediating kidney development, proteins that are similar to those described in SEQ ID NOS:104-107 (i.e., nephrins) have been the focus of intense scientific scrutiny (see, for example, PCT Patent Application Serial No. PCT/US99/05578, Publication Number WO 99/47562, and corresponding U.S. Pat. No. 6,207,811, which describe applications and uses that are applicable to the presently described proteins). Additionally, proteins related to those described in SEQ ID NOS:104-107 can serve as receptors for SLIT protein ligands (see, e.g., U.S. patent application Ser. No. 07/624,135, filed Dec. 7, 1990). Accordingly, an additional aspect of the present invention includes the use of slit proteins and slit protein homologs (as well as soluble versions of SEQ ID NOS:104-107) to treat kidney or adipose related diseases or disorders.

[0025] Given their structural relatedness of the presently described cadherin-like sequences to a variety of animal cadherin family proteins and the Drosophila tumor suppressor FAT, uses and applications relevant to the presently described cadherin-like sequences are described in U.S. Pat. No. 5,639,634.

[0026] The present invention encompasses the nucleotides presented in the Sequence Listing, host cells expressing such nucleotides, the expression products of such nucleotides, and: (a) nucleotides that encode mammalian homologs of the described nucleotides, including the specifically described human membrane proteins, and the human membrane protein products; (b) nucleotides that encode one or more portions of the human membrane proteins that correspond to functional domains, and the polypeptide products specified by such nucleotide sequences, including, but not limited to, the novel regions of any active domain(s); (c) isolated nucleotides that encode mutant versions, engineered or naturally occurring, of the described membrane proteins, in which all or a part of at least one domain is deleted or altered, and the polypeptide products specified by such nucleotide sequences, including, but not limited to, soluble proteins and peptides in which all or a portion of the signal sequence is deleted; (d) nucleotides that encode chimeric fusion proteins containing all or a portion of a coding region of a membrane protein, or one of its domains (e.g., a receptor or ligand binding domain, accessory protein/self-association domain, etc.) fused to another peptide or polypeptide; or (e) therapeutic or diagnostic derivatives of the described polynucleotides, such as oligonucleotides, antisense polynucleotides, ribozymes, dsRNA, or gene therapy constructs, comprising a sequence first disclosed in the Sequence Listing.

[0027] As discussed above, the present invention includes the human DNA sequences presented in the Sequence Listing (and vectors comprising the same), and additionally contemplates any nucleotide sequence encoding a contiguous membrane protein open reading frame (ORF) that hybridizes to a complement of a DNA sequence presented in the Sequence Listing under highly stringent conditions, e.g., hybridization to filter-bound DNA in 0.5 M NaHPO₄, 7% sodium dodecyl sulfate (SDS), 1 mM EDTA at 65° C., and washing in 0.1×SSC/0.1% SDS at 68° C. (“Current Protocols in Molecular Biology”, Vol. 1, p. 2.10.3 (Ausubel et al., eds., Green Publishing Associates, Inc., and John Wiley & Sons, Inc., New York, 1989)) and encodes a functionally equivalent expression product. Additionally contemplated are any nucleotide sequences that hybridize to the complement of a DNA sequence that encodes and expresses an amino acid sequence presented in the Sequence Listing under moderately stringent conditions, e.g., washing in 0.2×SSC/0.1% SDS at 42° C. (“Current Protocols in Molecular Biology”, supra), yet still encodes a functionally equivalent membrane protein product. Functional equivalents of a membrane protein include naturally occurring membrane proteins present in other species, and mutant membrane proteins, whether naturally occurring or engineered (by site directed mutagenesis, gene shuffling, directed evolution as described in, for example, U.S. Pat. No. 5,837,458). The invention also includes degenerate nucleic acid variants of the disclosed membrane protein polynucleotide sequences.

[0028] Additionally contemplated are polynucleotides encoding membrane protein ORFs, or their functional equivalents, encoded by polynucleotide sequences that are about 99, 95, 90, or about 85 percent similar or identical to corresponding regions of the nucleotide sequences of the Sequence Listing (as measured by BLAST sequence comparison analysis using, for example, the GCG sequence analysis package (the University of Wisconsin GCG sequence analysis package, SEQUENCHER 3.0, Gene Codes Corp., Ann Arbor, Mich.) using default settings).

[0029] The invention also includes nucleic acid molecules, preferably DNA molecules, that hybridize to, and are therefore the complements of, the described membrane protein nucleotide sequences. Such hybridization conditions may be highly stringent or less highly stringent, as described herein. In instances where the nucleic acid molecules are deoxyoligonucleotides, such molecules are generally about 16 to about 100 bases long, or about 20 to about 80 bases long, or about 34 to about 45 bases long, or any variation or combination of sizes represented therein that incorporate a contiguous region of sequence first disclosed in the Sequence Listing. Such oligonucleotides can be used in conjunction with the polymerase chain reaction (PCR) to screen libraries, isolate clones, and prepare cloning and sequencing templates, etc.

[0030] Alternatively, such membrane protein oligonucleotides can be used as hybridization probes for screening libraries, and assessing gene expression patterns (particularly using a microarray or high-throughput “chip” format). Additionally, a series of oligonucleotide sequences, or the complements thereof, can be used to represent all or a portion of the described membrane protein sequences. An oligonucleotide or polynucleotide sequence first disclosed in at least a portion of one or more of the sequences of SEQ ID NOS:1-270 can be used as a hybridization probe in conjunction with a solid support matrix/substrate (resins, beads, membranes, plastics, polymers, metal or metallized substrates, crystalline or polycrystalline substrates, etc.). Of particular note are spatially addressable arrays (i.e., gene chips, microtiter plates, etc.) of oligonucleotides and polynucleotides, or corresponding oligopeptides and polypeptides, wherein at least one of the biopolymers present on the spatially addressable array comprises an oligonucleotide or polynucleotide sequence first disclosed in at least one of the sequences of SEQ ID NOS:1-270, or an amino acid sequence encoded thereby. Methods for attaching biopolymers to, or synthesizing biopolymers on, solid support matrices, and conducting binding studies thereon, are disclosed in, inter alia, U.S. Pat. Nos. 5,700,637, 5,556,752, 5,744,305, 4,631,211, 5,445,934, 5,252,743, 4,713,326, 5,424,186, and 4,689,405.

[0031] Addressable arrays comprising sequences first disclosed in SEQ ID NOS:1-270 can be used to identify and characterize the temporal and tissue specific expression of a gene. These addressable arrays incorporate oligonucleotide sequences of sufficient length to confer the required specificity, yet be within the limitations of the production technology. The length of these probes is usually within a range of between about 8 to about 2000 nucleotides. Preferably the probes consist of 60 nucleotides, and more preferably 25 nucleotides, from the sequences first disclosed in SEQ ID NOS:1-270.

[0032] For example, a series of oligonucleotide sequences, or the complements thereof, can be used in chip format to represent all or a portion of the described membrane protein sequences. The oligonucleotides, typically between about 16 to about 40 (or any whole number within the stated range) nucleotides in length, can partially overlap each other, and/or the sequence may be represented using oligonucleotides that do not overlap. Accordingly, the described polynucleotide sequences shall typically comprise at least about two or three distinct oligonucleotide sequences of at least about 8 nucleotides in length that are each first disclosed in the described Sequence Listing. Such oligonucleotide sequences can begin at any nucleotide present within a sequence in the Sequence Listing, and proceed in either a sense (5′-to-3′) orientation vis-a-vis the described sequence or in an antisense orientation.

[0033] Microarray-based analysis allows the discovery of broad patterns of genetic activity, providing new understanding of gene functions, and generating novel and unexpected insight into transcriptional processes and biological mechanisms. The use of addressable arrays comprising sequences first disclosed in SEQ ID NOS:1-270 provides detailed information about transcriptional changes involved in a specific pathway, potentially leading to the identification of novel components, or gene functions that manifest themselves as novel phenotypes.

[0034] Probes consisting of sequences first disclosed in SEQ ID NOS:1-270 can also be used in the identification, selection, and validation of novel molecular targets for drug discovery. The use of these unique sequences permits the direct confirmation of drug targets, and recognition of drug dependent changes in gene expression that are modulated through pathways distinct from the intended target of the drug. These unique sequences therefore also have utility in defining and monitoring both drug action and toxicity.

[0035] As an example of utility, the sequences first disclosed in SEQ ID NOS:1-270 can be utilized in microarrays, or other assay formats, to screen collections of genetic material from patients who have a particular medical condition. These investigations can also be carried out using the sequences first disclosed in SEQ ID NOS:1-270 in silico, and by comparing previously collected genetic databases and the disclosed sequences using computer software known to those in the art.

[0036] Thus the sequences first disclosed in SEQ ID NOS:1-270 can be used to identify mutations associated with a particular disease, and also in diagnostic or prognostic assays.

[0037] Although the presently described sequences have been specifically described using nucleotide sequence, it should be appreciated that each of the sequences can uniquely be described using any of a wide variety of additional structural attributes, or combinations thereof. For example, a given sequence can be described by the net composition of the nucleotides present within a given region of the sequence, in conjunction with the presence of one or more specific oligonucleotide sequence(s) first disclosed in SEQ ID NOS:1-270. Alternatively, a restriction map specifying the relative positions of restriction endonuclease digestion sites, or various palindromic or other specific oligonucleotide sequences, can be used to structurally describe a given sequence. Such restriction maps, which are typically generated by widely available computer programs (e.g., the University of Wisconsin GCG sequence analysis package, SEQUENCHER 3.0, Gene Codes Corp., etc.), can optionally be used in conjunction with one or more discrete nucleotide sequence(s) present in the sequence that can be described by the relative position of the sequence relative to one or more additional sequence(s) or one or more restriction sites present in the disclosed sequence.

[0038] For oligonucleotide probes, highly stringent conditions may refer, e.g., to washing in 6×SSC/0.05% sodium pyrophosphate at 37° C. (for 14-base oligos), 48° C. (for 17-base oligos), 55° C. (for 20-base oligos), and 60° C. (for 23-base oligos). These nucleic acid molecules may encode or act as antisense molecules, useful, for example, in membrane protein gene regulation and/or as antisense primers in amplification reactions of membrane protein nucleic acid sequences. With respect to membrane protein gene regulation, such techniques can be used to regulate biological functions. Further, such sequences may be used as part of ribozyme and/or triple helix sequences that are also useful for membrane protein gene regulation.

[0039] Inhibitory antisense or double stranded oligonucleotides can additionally comprise at least one modified base moiety that is selected from the group including, but not limited to, 5-fluorouracil, 5-bromouracil, 5-chlorouracil, 5-iodouracil, hypoxanthine, xanthine, 5-(carboxyhydroxylmethyl) uracil, 4-acetylcytosine, 5-carboxymethylaminomethyl-2-thiouridine, 5-carboxymethylaminomethyluracil, beta-D-galactosylqueosine, inosine, N6-isopentenyladenine, 1-methylguanine, 1-methylinosine, 2,2-dimethylguanine, 2-methyladenine, 2-methylguanine, 3-methylcytosine, 5-methylcytosine, N6-adenine, 7-methylguanine, 5-methylaminomethyluracil, 5-methoxyaminomethyl-2-thiouracil, beta-D-mannosylqueosine, 5′-methoxycarboxymethyluracil, queosine, 5-methoxyuracil, 2-methylthio-N6-isopentenyladenine, pseudouracil, uracil-5-oxyacetic acid (v), wybutoxosine, 2-thiocytosine, 5-methyl-2-thiouracil, 2-thiouracil, 4-thiouracil, 5-methyluracil, dihydrouracil, uracil-5-oxyacetic acid methylester, (acp3)w, 3-(3-amino-3-N-2-carboxypropyl) uracil, and 2,6-diaminopurine.

[0040] The antisense oligonucleotide can also comprise at least one modified sugar moiety selected from the group including, but not limited to, arabinose, 2-fluoroarabinose, xylulose, and hexose.

[0041] In yet another embodiment, the antisense oligonucleotide will comprise at least one modified phosphate backbone selected from the group including, but not limited to, a phosphorothioate, a phosphorodithioate, a phosphoramidothioate, a phosphoramidate, a phosphordiamidate, a methylphosphonate, an alkyl phosphotriester, and a formacetal or analog thereof.

[0042] In yet another embodiment, the antisense oligonucleotide is an α-anomeric oligonucleotide. An α-anomeric oligonucleotide forms specific double-stranded hybrids with complementary RNA in which, contrary to the usual β-units, the strands run parallel to each other (Gautier et al., Nucl. Acids Res. 15:6625-6641, 1987). The oligonucleotide is a 2′-0-methylribonucleotide (Inoue et al., Nucl. Acids Res. 15:6131-6148, 1987), or a chimeric RNA-DNA analogue (Inoue et al., FEBS Lett. 215:327-330, 1987). Alternatively, double stranded RNA can be used to disrupt the expression and function of a targeted membrane protein.

[0043] Oligonucleotides of the invention can be synthesized by standard methods known in the art, e.g., by use of an automated DNA synthesizer (such as are commercially available from Biosearch, Applied Biosystems, etc.). As examples, phosphorothioate oligonucleotides can be synthesized (Stein et al., Nucl. Acids Res. 16:3209-3221, 1988), and methylphosphonate oligonucleotides can be prepared by use of controlled pore glass polymer supports (Sarin et al., Proc. Natl. Acad. Sci. USA 85:7448-7451, 1988), etc.

[0044] Low stringency conditions are well-known to those of skill in the art, and will vary predictably depending on the specific organisms from which the library and the labeled sequences are derived. For guidance regarding such conditions, see, for example, “Molecular Cloning, A Laboratory Manual” (Sambrook et al., eds., Cold Spring Harbor Press, Cold Spring Harbor, N.Y., 1989), “Current Protocols in Molecular Biology”, supra, and periodic updates thereof.

[0045] Alternatively, suitably labeled membrane protein nucleotide probes can be used to screen a human genomic library using appropriately stringent conditions or by PCR. The identification and characterization of human genomic clones is helpful for identifying polymorphisms (including, but not limited to, nucleotide repeats, microsatellite alleles, single nucleotide polymorphisms, or coding single nucleotide polymorphisms), determining the genomic structure of a given locus/allele, and designing diagnostic tests. For example, sequences derived from regions adjacent to the intron/exon boundaries of the human gene can be used to design primers for use in amplification assays to detect mutations within the exons, introns, splice sites (e.g., splice acceptor and/or donor sites), etc., that can be used in diagnostics and pharmacogenomics.

[0046] For example, the present sequences can be used in restriction fragment length polymorphism (RFLP) analysis to identify specific individuals. In this technique, an individual's genomic DNA is digested with one or more restriction enzymes, and probed on a Southern blot to yield unique bands for identification (as generally described in U.S. Pat. No. 5,272,057). In addition, the sequences of the present invention can be used to provide polynucleotide reagents, e.g., PCR primers, targeted to specific loci in the human genome, which can enhance the reliability of DNA-based forensic identifications by, for example, providing another “identification marker” (i.e., another DNA sequence that is unique to a particular individual). Actual base sequence information can be used for identification as an accurate alternative to patterns formed by restriction enzyme generated fragments.

[0047] Further, a membrane protein gene homolog can be isolated from nucleic acid from an organism of interest by performing PCR using two degenerate or “wobble” oligonucleotide primer pools designed on the basis of amino acid sequences within the membrane protein products disclosed herein. The template for the reaction may be genomic DNA, or total RNA, mRNA, and/or cDNA obtained by reverse transcription of mRNA prepared from human or non-human cell lines or tissue known to express, or suspected of expressing, an allele of a membrane protein gene. The PCR product can be subcloned and sequenced to ensure that the amplified sequences represent the sequence of the desired membrane protein gene. The PCR fragment can then be used to isolate a full length cDNA clone by a variety of methods. For example, the amplified fragment can be labeled and used to screen a cDNA library, such as a bacteriophage cDNA library. Alternatively, the labeled fragment can be used to isolate genomic clones via the screening of a genomic library.

[0048] PCR technology can also be used to isolate full length cDNA sequences. For example, RNA can be isolated, following standard procedures, from an appropriate cellular or tissue source (i.e., one known to express, or suspected of expressing, a membrane protein gene). A reverse transcription (RT) reaction can be performed on the RNA using an oligonucleotide primer specific for the most 5′ end of the amplified fragment for the priming of first strand synthesis. The resulting RNA/DNA hybrid may then be “tailed” using a standard terminal transferase reaction, the hybrid may be digested with RNase H, and second strand synthesis may then be primed with a complementary primer. Thus, cDNA sequences upstream of the amplified fragment can be isolated. For a review of cloning strategies that can be used, see, e.g., “Molecular Cloning, A Laboratory Manual”, supra.

[0049] A cDNA encoding a mutant membrane protein sequence can be isolated, for example, by using PCR. In this case, the first cDNA strand may be synthesized by hybridizing an oligo-dT oligonucleotide to mRNA isolated from tissue known to express, or suspected of expressing, a membrane protein, in an individual putatively carrying a mutant membrane protein allele, and by extending the new strand with reverse transcriptase. The second strand of the cDNA is then synthesized using an oligonucleotide that hybridizes specifically to the 5′ end of the normal sequence. Using these two primers, the product is then amplified via PCR, optionally cloned into a suitable vector, and subjected to DNA sequence analysis through methods well-known to those of skill in the art. By comparing the DNA sequence of the mutant membrane protein allele to that of a corresponding normal membrane protein allele, the mutation(s) responsible for the loss or alteration of function of the mutant membrane protein gene product can be ascertained.

[0050] Alternatively, a genomic library can be constructed using DNA obtained from an individual suspected of carrying, or known to carry, a mutant membrane protein allele (e.g., a person manifesting a membrane protein-associated phenotype such as, for example, arthritis, osteoporosis, obesity, high blood pressure, connective tissue disorders, paralysis or palsy, nerve damage or degeneration, inflammatory disorders, vision disorders, depression, seizures, infertility, cancer, etc.), or a cDNA library can be constructed using RNA from a tissue known to express, or suspected of expressing, a mutant membrane protein allele. A normal membrane protein gene, or any suitable fragment thereof, can then be labeled and used as a probe to identify the corresponding mutant membrane protein allele in such libraries. Clones containing mutant membrane protein sequences can then be purified and subjected to sequence analysis according to methods well-known to those skilled in the art.

[0051] Additionally, an expression library can be constructed utilizing cDNA synthesized from, for example, RNA isolated from a tissue known to express, or suspected of expressing, a mutant membrane protein allele in an individual suspected of carrying, or known to carry, such a mutant allele. In this manner, gene products made by the putatively mutant tissue can be expressed and screened using standard antibody screening techniques in conjunction with antibodies raised against a normal membrane protein product, as described below (for screening techniques, see, for example, “Antibodies: A Laboratory Manual” (Harlow and Lane, eds., Cold Spring Harbor Press, Cold Spring Harbor, N.Y., 1988)).

[0052] Additionally, screening can be accomplished by screening with labeled membrane protein fusion proteins, such as, for example, alkaline phosphatase-membrane protein or membrane protein-alkaline phosphatase fusion proteins. In cases where a membrane protein mutation results in an expression product with altered function (e.g., as a result of a missense or a frameshift mutation), polyclonal antibodies to a membrane protein are likely to cross-react with a corresponding mutant membrane protein expression product. Library clones detected via their reaction with such labeled antibodies can be purified and subjected to sequence analysis according to methods well-known in the art.

[0053] The invention also encompasses: (a) DNA vectors that contain any of the foregoing membrane protein coding sequences and/or their complements (i.e., antisense); (b) DNA expression vectors that contain any of the foregoing membrane protein coding sequences operatively associated with a regulatory element that directs the expression of the coding sequences (for example, baculovirus as described in U.S. Pat. No. 5,869,336); (c) genetically engineered host cells that contain any of the foregoing membrane protein coding sequences operatively associated with a regulatory element that directs the expression of the coding sequences in the host cell; and (d) genetically engineered host cells that express an endogenous membrane protein sequence under the control of an exogenously introduced regulatory element (i.e., gene activation). As used herein, regulatory elements include, but are not limited to, inducible and non-inducible promoters, enhancers, operators, and other elements known to those skilled in the art that drive and regulate expression. Such regulatory elements include, but are not limited to, the cytomegalovirus (hCMV) immediate early gene, regulatable, viral elements (particularly retroviral LTR promoters), the early or late promoters of SV40 or adenovirus, the lac system, the trp system, the TAC system, the TRC system, the major operator and promoter regions of phage lambda, the control regions of fd coat protein, the promoter for 3-phosphoglycerate kinase (PGK), the promoters of acid phosphatase, and the promoters of the yeast α-mating factors.

[0054] The present invention also encompasses antibodies and anti-idiotypic antibodies (including Fab fragments), antagonists and agonists of the described membrane proteins, as well as compounds or nucleotide constructs that inhibit expression of a membrane protein sequence (transcription factor inhibitors, antisense and ribozyme molecules, or open reading frame sequence or regulatory sequence replacement constructs), or promote the expression of a membrane protein (e.g., expression constructs in which membrane protein coding sequences are operatively associated with expression control elements such as promoters, promoter/enhancers, etc.).

[0055] The membrane proteins, peptides, fusion proteins, nucleotide sequences, antibodies, antagonists, and agonists can be useful for the detection of mutant membrane proteins, or inappropriately expressed membrane proteins, for the diagnosis of disease. The membrane proteins, peptides, fusion proteins, nucleotide sequences, host cell expression systems, antibodies, antagonists, agonists, and genetically engineered cells and animals can be used for screening for drugs (or high throughput screening of combinatorial libraries) effective in the treatment of the symptomatic or phenotypic manifestations of perturbing the normal function of a membrane protein in the body. The use of engineered host cells and/or animals may offer an advantage in that such systems allow not only for the identification of compounds that bind to the endogenous receptor for a membrane protein, but can also identify compounds that trigger membrane protein-mediated activities or pathways.

[0056] Finally, the membrane protein products can be used as therapeutics. For example, soluble derivatives, such as peptides/domains corresponding to membrane proteins, membrane protein fusion protein products (especially membrane protein-Ig fusion proteins, i.e., fusions of a membrane protein, or a domain of a membrane protein, to an IgFc), membrane protein antibodies and anti-idiotypic antibodies (including Fab fragments), antagonists or agonists (including compounds that modulate or act on downstream targets in a membrane protein-mediated pathway), can be used to directly treat diseases, including infectious diseases, or disorders. For instance, the administration of an effective amount of a soluble membrane protein, a membrane protein-IgFc fusion protein, or an anti-idiotypic antibody (or its Fab) that mimics a membrane protein, could activate or effectively antagonize an endogenous membrane protein receptor. Nucleotide constructs encoding such membrane protein products can be used to genetically engineer host cells to express such products in vivo; these genetically engineered cells function as “bioreactors” in the body delivering a continuous supply of a membrane protein, peptide, or fusion protein to the body. Nucleotide constructs encoding functional membrane proteins, mutant membrane proteins, as well as antisense and ribozyme molecules, can also be used in “gene therapy” approaches for the modulation of membrane protein expression. Thus, the invention also encompasses pharmaceutical formulations and methods for treating biological disorders.

[0057] Various aspects of the invention are described in greater detail in the subsections below.

### 7.1 Membrane Protein Nucleic Acid Sequences

[0058] The cDNA sequences and the corresponding deduced amino acid sequences of the described membrane proteins are presented in the Sequence Listing. The membrane protein nucleotide sequences were obtained from: human lymph node, kidney, and fetal brain cDNA libraries (SEQ ID NOS:1-4); clustered human gene trapped sequences, ESTs and human kidney and bone marrow cDNA libraries (SEQ ID NOS:5-8); human gene trapped sequence tags and cDNA clones from a human testis cDNA library (SEQ ID NOS:9-22); clustered human gene trapped sequences, and ESTs from human testis cells (SEQ ID NOS:23-31); clustered human gene trapped sequences, and clones from human trachea, pituitary, and lung cDNA libraries (SEQ ID NOS:32-35); clustered human gene trapped sequences, ESTs, and cDNAs isolated from human brain, fetal brain, cerebellum, and hypothalamus cDNA libraries (SEQ ID NOS:36-62); clustered human gene trapped sequences, ESTs, and cDNA isolated from a human testis cell library (SEQ ID NOS:63-74); clustered human gene trapped sequences, genomic sequence, ESTs, cDNAs from a human brain cDNA library, and human RT-PCR cDNA products from RNA preparations from human brain, cerebellum, hypothalamus, pituitary, and spinal cord (SEQ ID NOS:75-91); a human pituitary gland cDNA library, and RT-PCR products generated using fetal brain, brain, pituitary gland, and testis mRNA (SEQ ID NOS:92-103); a human kidney cDNA library and RACE products generated using human adipose and fetal kidney mRNA (SEQ ID NOS:104-107); clustered human sequences, cDNA isolated from a human brain cDNA library, as well as cDNAs made from fetal brain, adult brain, pituitary gland, and cerebellum mRNA (SEQ ID NOS:108-112); clustered human gene trapped sequences, genomic sequence, ESTs, and cDNAs from a skeletal muscle, bone marrow, and lymph node cDNA libraries (SEQ ID NOS:113-117); clustered genomic sequence, ESTs, and cDNAs from a trachea cDNA library (SEQ ID NOS:118-124); clustered genomic sequence encoded on human chromosome 8 (see GenBank Accession Number AC012215), ESTs, and cDNAs from testis, prostate, adrenal gland, kidney, and pituitary mRNAs (SEQ ID NOS:125-157); aligning cDNAs from bone marrow, lymph node, kidney, thymus, trachea, fetal kidney, fetal brain, testis, kidney, placenta, thymus, pituitary, and fetal mRNAs and human genomic DNA sequence (SEQ ID NOS:158-192); clustered human ESTs, and cDNAs made from brain mRNA (SEQ ID NOS:193-200); clustered genomic sequence, ESTs, and cDNAs from testis mRNA (SEQ ID NOS:201-203); clustered genomic sequence, ESTs, and cDNAs from skeletal muscle, trachea, lung, fetal kidney, fetal lung, lymph node, fetus, and bone marrow mRNAs (SEQ ID NOS:204 and 205); clustered genomic sequence, ESTs, and cDNAs produced using activated lymph node, fetal kidney, and fetus mRNAs (SEQ ID NOS:206-214); clustered genomic sequence, ESTs, and cDNAs produced using lymph node, bone marrow, and testis mRNAs (SEQ ID NOS:215-218); cDNAs prepared and isolated from human spinal cord, fetal brain, 6- and 9-week old embryos, cerebellum, lymph node and testis mRNAs (SEQ ID NOS:219-221); clustered human genomic sequences, ESTs, and human cDNAs made from testis, fetal kidney, kidney, mammary gland, and placenta mRNAs (SEQ ID NOS:222-228); clustered genomic sequence, ESTs, and cDNAs produced using human spleen, lymph node, and testis mRNAs (SEQ ID NOS:229-233); clustered genomic sequence, ESTs, and cDNAs produced using testis and kidney mRNAs (SEQ ID NOS:234-236); clustered genomic sequence, ESTs, and cDNAs produced using fetal brain, testis, fetal lung, lymph node, and fetal kidney mRNAs (SEQ ID NOS:237-240); clustered human sequences and cDNAs made from human lung, fetal brain, and adult brain mRNAs (SEQ ID NOS:241-262); and clustered genomic sequence, ESTs, and cDNAs produced using human thyroid and trachea mRNAs (SEQ ID NOS:263-270). The mRNAs and cDNA libraries were purchased from Clontech (Palo Alto, Calif.) and/or Edge Biosystems (Gaithersburg, Md.).

[0059] The genes encoding the described membrane proteins are apparently encoded on: human chromosome 1 (SEQ ID NOS:104-107); human chromosome 5, see GenBank Accession Number AC010457 (SEQ ID NOS:113-117); human chromosome 6, see GenBank Accession Number AL354719 (SEQ ID NOS:118-124); human chromosome 8, see GenBank Accession Number AC012215 (SEQ ID NOS:125-157); human chromosome 15, see GenBank Accession Number AC058820 (SEQ ID NOS:158-192); human chromosome 11, see GenBank Accession Number AC024231 (SEQ ID NOS:193-200); a single coding exon present on human chromosome 10, see GenBank Accession Number AL022345 (SEQ ID NOS:201-203); human chromosome 3, see GenBank Accession Number AC024888 (SEQ ID NOS:204 and 205); human chromosome 1, see GenBank Accession Number AC027070 (SEQ ID NOS:206-214); human chromosome 12, see GenBank Accession Number AC006927 (SEQ ID NOS:215-218); human chromosome 1, see GenBank Accession Number AC015973 (SEQ ID NOS:219-221); human chromosome 7, see GenBank Accession Number AC073468 (SEQ ID NOS:222-228); human chromosome 12, see GenBank Accession Number AC012555 (SEQ ID NOS:229-233); human chromosome 3, see GenBank Accession Number AC069529 (SEQ ID NOS:234-236); human chromosome 9, see GenBank Accession Number AL160274 (SEQ ID NOS:237-240); human chromosome 7, see GenBank Accession Number AC004836 (SEQ ID NOS:241-262); and human chromosome 8, see GenBank Accession Number AC021001 (SEQ ID NOS:263-270). As such, the described sequences can also be used to map the corresponding coding regions of the human genome, and to verify/identify mRNA exon splice junctions.

[0060] Several polymorphisms were identified, including: an A/G polymorphism at nucleotide (“nt”) position 1108 of SEQ ID NOS:5 and 7 (denoted by an “r” in the Sequence Listing), which can result in an isoleucine or valine residue at corresponding amino acid (“aa”) position 370 of SEQ ID NOS:6 and 8; a G/A polymorphism at nt position 1177 of SEQ ID NOS:9, 11, 13, 15, 17, 19, and 21 (denoted by an “r” in the Sequence Listing), which can result in a glutamate or lysine residue at corresponding aa position 393 of SEQ ID NOS:10, 12, 14, 16, 18, 20, and 22; a C/T polymorphism at nt position 812 of SEQ ID NOS:36, 38, 46, 48, 50, 52, 54, and 56 (denoted by a “y” in the Sequence Listing), which can result in a serine or leucine residue at corresponding aa position 271 of SEQ ID NOS:37, 39, 47, 49, 51, 53, 55, and 57; a G/A polymorphism at nt position 1024 of SEQ ID NOS:36, 46, 50, and 54 (denoted by an “r” in the Sequence Listing); which can result in an aspartate or asparagine residue at corresponding aa position 342 of SEQ ID NOS:37, 47, 51, and 55; a transcriptionally silent (“silent”) T/C polymorphism at nt position 1116 of SEQ ID NOS:36, 46, 50, and 54, and nt position 972 of SEQ ID NOS:38, 48, 52, and 56 (denoted by a “y” in the Sequence Listing), both of which result in a valine residue at corresponding aa position 372 of SEQ ID NOS:37, 47, 51, and 55, and aa position 324 of SEQ ID NOS:39, 49, 53, and 57; a C/T polymorphism at nt position 808 of SEQ ID NO:44, which can result in an arginine or tryptophan residue at corresponding aa position 270 of SEQ ID NO:45; a silent C/T polymorphism at nt position 99 of SEQ ID NOS:75, 77, 79, and 81, both of which result in an aspartate residue at corresponding aa position 33 of SEQ ID NOS:76, 78, 80, and 82; a C/A polymorphism at nt position 758 of SEQ ID NOS:75, 77, 79, and 81, and nt position 356 of SEQ ID NOS:83, 85, 87, and 89 (denoted by an “m” in the Sequence Listing), which can result in a serine or tyrosine residue at corresponding aa position 253 of SEQ ID NOS:76, 78, 80, and 82, and aa position 119 of SEQ ID NOS:84, 86, 88, and 90; a silent G/C polymorphism at nt position 750 of SEQ ID NO:104, and nt position 144 of SEQ ID NO:106 (denoted by an “s” in the Sequence Listing), both of which result in a proline residue at corresponding aa position 250 of SEQ ID NO:105, and aa position 48 of SEQ ID NO:107; a silent G/A polymorphism at nt position 264 of SEQ ID NO:108 (denoted by an “r” in the Sequence Listing), both of which result in a threonine residue at corresponding aa position 88 of SEQ ID NO:109; a silent A/T polymorphism at nt position 762 of SEQ ID NO:108 (denoted by a “w” in the Sequence Listing), both of which result in a serine residue at corresponding aa position 254 of SEQ ID NO:109; a silent G/T polymorphism at nt position 771 of SEQ ID NO:108 (denoted by a “k” in the Sequence Listing), both of which result in a tyrosine residue at corresponding aa position 257 of SEQ ID NO:109; a G/T polymorphism at nt position 1161 of SEQ ID NO:113 (denoted by a “k” in the Sequence Listing), which can result in a glutamine or histidine residue at corresponding aa position 387 of SEQ ID NO:114; a G/C polymorphism at nt position 2530 of SEQ ID NO:113 (denoted by an “s” in the Sequence Listing), which can result in an aspartate or histidine residue at corresponding aa position 844 of SEQ ID NO:114; an A/C polymorphism at nt position 661 of SEQ ID NO:118, and nt position 208 of SEQ ID NO:122 (denoted by an “m” in the Sequence Listing), which can result in a threonine or proline residue at corresponding aa position 221 of SEQ ID NO:119, and aa position 70 of SEQ ID NO:123; a silent A/C polymorphism at nt position 330 of SEQ ID NO:120 (denoted by an “m” in the Sequence Listing), both of which result in a valine residue at corresponding aa position 110 of SEQ ID NO:121; a G/C polymorphism at nt position 776 of SEQ ID NOS:125, 127, 129, 131, 133, 135, 137, and 139, and nt position 83 of SEQ ID NOS:141, 143, 145, 147, 149, 151, 153, and 155, which can result in a serine or threonine residue at corresponding aa position 259 of SEQ ID NOS:126, 128, 130, 132, 134, 136, 138, and 140, and aa position 28 of SEQ ID NOS:142, 144, 146, 148, 150, 152, 154, and 156, respectively; a T/C polymorphism at nt position 788 of SEQ ID NOS:125, 127, 129, 131, 133, 135, 137, and 139, and nt position 95 of SEQ ID NOS:141, 143, 145, 147, 149, 151, 153, and 155, which can result in a valine or alanine residue at corresponding aa position 263 of SEQ ID NOS:126, 128, 130, 132, 134, 136, 138, and 140, and aa position 32 of SEQ ID NOS:142, 144, 146, 148, 150, 152, 154, and 156, respectively; a C/T polymorphism at nt position 1276 of SEQ ID NOS:125 and 133, nt position 1243 of SEQ ID NOS:127 and 135, nt position 1234 of SEQ ID NOS:129 and 137, nt position 1201 of SEQ ID NOS:131 and 139, nt position 583 of SEQ ID NOS:141 and 149, nt position 550 of SEQ ID NOS:143 and 151, nt position 541 of SEQ ID NOS:145 and 153, and nt position 508 of SEQ ID NOS:147 and 155, which can result in a leucine or phenylalanine residue at corresponding aa position 426 of SEQ ID NOS:126 and 134, aa position 415 of SEQ ID NOS:128 and 136, aa position 412 of SEQ ID NOS:130 and 138, aa position 401 of SEQ ID NOS:132 and 140, aa position 195 of SEQ ID NOS:142 and 150, aa position 184 of SEQ ID NOS:144 and 152, aa position 181 of SEQ ID NOS:146 and 154, and aa position 170 of SEQ ID NOS:148 and 156, respectively; a silent C/T polymorphism at nt position 1425 of SEQ ID NOS:158, 160, 162, 164, 166, 168, 170, 172, and 174, and nt position 1266 of SEQ ID NOS:176, 178, 180, 182, 184, 186, 188, and 190, both of which result in a phenylalanine residue at corresponding aa position 475 of SEQ ID NOS:159, 161, 163, 165, 167, 169, 171, 173, and 175, and aa position 422 of SEQ ID NOS:177, 179, 181, 183, 185, 187, 189, and 191; a silent G/A polymorphism at nt position 2502 of SEQ ID NOS:168 and 172, nt position 3387 of SEQ ID NOS:170 and 174, nt position 2343 of SEQ ID NO:186, and nt position 3228 of SEQ ID NOS:188 and 190, both of which result in a proline residue at corresponding aa position 834 of SEQ ID NOS:169 and 173, aa position 1129 of SEQ ID NOS:171 and 175, aa position 781 of SEQ ID NO:187, and aa position 1076 of SEQ ID NOS:189 and 191; an A/T polymorphism at nt position 4543 of SEQ ID NOS:193, 195, and 199, and nt position 4531 of SEQ ID NO:197, which can result in a threonine or serine residue at corresponding aa position 1515 of SEQ ID NOS:194, 196, and 200, and aa position 1511 of SEQ ID NO:198; an A/G polymorphism at nt position 4775 of SEQ ID NOS:193, 195, and 199, and nt position 4763 of SEQ ID NO:197, which can result in an aspartate or glycine residue at corresponding aa position 1592 of SEQ ID NOS:194, 196, and 200, and aa position 1588 of SEQ ID NO:198; an A/G polymorphism at nt position 6878 of SEQ ID NOS:193, 195, and 199, and nt position 6866 of SEQ ID NO:197, which can result in an asparagine or serine residue at corresponding aa position 2293 of SEQ ID NOS:194, 196, and 200, and aa position 2289 of SEQ ID NO:198; a G/C polymorphism at nt position 7227 of SEQ ID NOS:193, 195, and 199, and nt position 7215 of SEQ ID NO:197, which can result in an arginine or proline residue at corresponding aa position 2409 of SEQ ID NOS:194, 196, and 200, and aa position 2405 of SEQ ID NO:198; a G/A polymorphism at nt position 8263 of SEQ ID NOS:193, 195, and 199, and nt position 8251 of SEQ ID NO:197, which can result in a valine or isoleucine residue at corresponding aa position 2755 of SEQ ID NOS:194, 196, and 200, and aa position 2751 of SEQ ID NO:198; a G/A polymorphism at nt position 10552 of SEQ ID NOS:193, 195, and 199, and nt position 10540 of SEQ ID NO:197, which can result in valine or leucine residue at corresponding aa position 3518 of SEQ ID NOS:194, 196, and 200, and aa position 3514 of SEQ ID NO:198; a G/A polymorphism at nt position 11434 of SEQ ID NOS:193, 195, and 199, and nt position 11422 of SEQ ID NO:197, which can result in a glycine or serine residue at corresponding aa position 3812 of SEQ ID NOS:194, 196, and 200, and aa position 3808 of SEQ ID NO:198; a C/A polymorphism at nt position 12691 of SEQ ID NO:193, nt position 12679 of SEQ ID NO:197, and nt position 12688 of SEQ ID NO:199, which can result in a proline or threonine residue at corresponding aa position 4231 of SEQ ID NO:194, aa position 4227 of SEQ ID NO:198, and aa position 4230 of SEQ ID NO:200; a G/A polymorphism at nt position 12770 of SEQ ID NO:193, nt position 12758 of SEQ ID NO:197, and nt position 12767 of SEQ ID NO:199, which can result in a glycine or glutamate residue at corresponding aa position 4257 of SEQ ID NO:194, aa position 4253 of SEQ ID NO:198, and aa position 4256 of SEQ ID NO:200; a C/G polymorphism at nt position 12820 of SEQ ID NO:193, nt position 12808 of SEQ ID NO:197, and nt position 12817 of SEQ ID NO:199, which can result in a leucine or valine at corresponding aa position 4274 of SEQ ID NO:194, aa position 4270 of SEQ ID NO:198, and aa position 4273 of SEQ ID NO:200; a silent T/G polymorphism at nt position 336 of SEQ ID NOS:206 and 210, and nt position 444 of SEQ ID NOS:208 and 212, both of which result in an alanine residue at corresponding aa position 112 of SEQ ID NOS:207 and 211, and aa position 148 of SEQ ID NOS:209 and 213; a C/G polymorphism at nt position 424 of SEQ ID NOS:206 and 210, and nt position 532 of SEQ ID NOS:208 and 212, which can result in a glutamine or glutamate residue at corresponding aa position 142 of SEQ ID NOS:207 and 211, and aa position 178 of SEQ ID NOS:209 and 213; a silent C/G polymorphism at nt position 864 of SEQ ID NO:206, and nt position 972 of SEQ ID NO:208, both of which result in a proline residue at corresponding aa position 288 of SEQ ID NO:207, and aa position 324 of SEQ ID NO:209; a G/C polymorphism at nt position 901 of SEQ ID NO:206, and nt position 1009 of SEQ ID NO:208, which can result in an alanine or proline residue at corresponding aa position 301 of SEQ ID NO:207, and aa position 337 of SEQ ID NO:209; a T/C polymorphism at nt position 103 of SEQ ID NO:217 (denoted by a “y” in the Sequence Listing), which can result in a proline or serine residue at corresponding aa position 35 of SEQ ID NO:218; a silent T/C polymorphism at nt position 1644 of SEQ ID NO:229, and nt position 1737 of SEQ ID NO:231, both of which result in an asparagine residue at corresponding aa position 548 of SEQ ID NO:230, and aa position 579 of SEQ ID NO:232; a silent T/C polymorphism at nt position 2349 of SEQ ID NO:229, and nt position 2442 of SEQ ID NO:231, both of which result in a cysteine residue at corresponding aa position 783 of SEQ ID NO:230, and aa position 814 of SEQ ID NO:232; a silent T/C polymorphism at nt position 3162 of SEQ ID NO:229, and nt position 3255 of SEQ ID NO:231, both of which result in a histidine residue at corresponding aa position 1054 of SEQ ID NO:230, and aa position 1085 of SEQ ID NO:232; a silent C/T polymorphism at nt position 3405 of SEQ ID NO:229, and nt position 3498 of SEQ ID NO:231, both of which result in an asparagine residue at corresponding aa position 1135 of SEQ ID NO:230, and aa position 1166 of SEQ ID NO:232; an A/C polymorphism at nt position 4024 of SEQ ID NO:229, and nt position 4117 of SEQ ID NO:231, which can result in an asparagine or histidine residue at corresponding aa position 1342 of SEQ ID NO:230, and aa position 1373 of SEQ ID NO:232; a silent G/A polymorphism at nt position 4293 of SEQ ID NO:229, and nt position 4386 of SEQ ID NO:231, both of which result in an alanine residue at corresponding aa position 1431 of SEQ ID NO:230, and aa position 1462 of SEQ ID NO:232; a silent C/T polymorphism at nt position 4320 of SEQ ID NO:229, and nt position 4413 of SEQ ID NO:231, both of which result in a phenylalanine residue at corresponding aa position 1440 of SEQ ID NO:230, and aa position 1471 of SEQ ID NO:232; a C/G polymorphism at nt position 5506 of SEQ ID NO:229, and nt position 5599 of SEQ ID NO:231, which can result in a leucine or valine residue at corresponding aa position 1836 of SEQ ID NO:230, and aa position 1867 of SEQ ID NO:232; a GC/TG polymorphism at nt positions 5704 and 5705 of SEQ ID NO:229, and nt positions 5797 and 5798 of SEQ ID NO:231, which can result in an alanine or cysteine residue at corresponding aa position 1902 of SEQ ID NO:230, and aa position 1933 of SEQ ID NO:232; a T/A polymorphism at nt position 5780 of SEQ ID NO:229, and nt position 5873 of SEQ ID NO:231, which can result in a phenylalanine or tyrosine residue at corresponding aa position 1927 of SEQ ID NO:230, and aa position 1958 of SEQ ID NO:232; an A/C polymorphism at nt position 871 of SEQ ID NOS:241, 249, 251, and 261, nt position 778 of SEQ ID NOS:243, 253, 257, and 259, and nt position 55 of SEQ ID NOS:247 and 255, which can result in a threonine or serine residue at corresponding aa position 291 of SEQ ID NOS:242, 250, 252, and 262, aa position 260 of SEQ ID NOS:244, 254, 258, and 260, and aa position 19 of SEQ ID NOS:248 and 256; an A/G polymorphism at nt position 878 of SEQ ID NOS:241, 249, 251, and 261, nt position 785 of SEQ ID NOS:243, 253, 257, and 259, and nt position 62 of SEQ ID NOS:247 and 255, which can result in a glutamine or proline residue at corresponding aa position 293 of SEQ ID NOS:242, 250, 252, and 262, aa position 262 of SEQ ID NOS:244, 254, 258, and 260, and aa position 21 of SEQ ID NOS:248 and 256; a G/T polymorphism at nt position 1430 of SEQ ID NOS:241 and 251, nt position 1337 of SEQ ID NOS:243 and 259, nt position 614 of SEQ ID NO:247, nt position 1355 of SEQ ID NOS:249 and 261, nt position 1262 of SEQ ID NO:253, and nt position 539 of SEQ ID NO:255, which can result in an arginine or isoleucine residue at corresponding aa position 477 of SEQ ID NO:242 and 252, aa position 446 of SEQ ID NOS:244 and 260, aa position 205 of SEQ ID NO:248, aa position 452 of SEQ ID NOS:250 and 262, aa position 421 of SEQ ID NO:254, and aa position 180 of SEQ ID NO:256; a T/G polymorphism at nt position 2579 of SEQ ID NO:241, nt position 2486 of SEQ ID NO:243, nt position 1763 of SEQ ID NO:247, nt position 2504 of SEQ ID NO:249, nt position 2411 of SEQ ID NO:253, and nt position 1688 of SEQ ID NO:255, which can result in a valine or glycine residue at corresponding aa position 860 of SEQ ID NO:242, aa position 829 of SEQ ID NO:244, aa position 588 of SEQ ID NO:248, aa position 835 of SEQ ID NO:250, aa position 804 of SEQ ID NO:254, and aa position 563 of SEQ ID NO:256; a silent A/G polymorphism at nt position 159 of SEQ ID NOS:263, 265, 267, and 269, both of which result in a glycine residue at corresponding aa position 53 of SEQ ID NOS:264, 266, 268, and 270; a C/T polymorphism at nt position 472 of SEQ ID NOS:263, 265, 267, and 269, which can result in a proline or serine residue at corresponding aa position 158 of SEQ ID NOS:264, 266, 268, and 270; a G/C polymorphism at nt position 753 of SEQ ID NOS:263, 265, 267, and 269, which can result in a glutamine or histidine residue at corresponding aa position 251 of SEQ ID NOS:264, 266, 268, and 270; a silent G/A polymorphism at nt position 1227 of SEQ ID NOS:263, 265, 267, and 269, both of which result in a lysine residue at corresponding aa position 409 of SEQ ID NOS:264, 266, 268, and 270; a silent T/C polymorphism at nt position 1404 of SEQ ID NOS:263, 265, 267, and 269, both of which result in a tyrosine residue at corresponding aa position 468 of SEQ ID NOS:264, 266, 268, and 270; a G/A polymorphism at nt position 2768 of SEQ ID NOS:263, 265, and 269, which can result in an arginine or histidine residue at corresponding aa position 923 of SEQ ID NOS:264, 266, and 270; a T/G polymorphism at nt position 3321 of SEQ ID NOS:263, 265, and 269, which can result in a cysteine or tryptophan residue at corresponding aa position 1107 of SEQ ID NOS:264, 266, and 270; an A/G polymorphism at nt position 4913 of SEQ ID NOS:263, 265, and 269, which can result in a tyrosine or cysteine residue at corresponding aa position 1638 of SEQ ID NOS:264, 266, and 270; a T/C polymorphism at nt position 5264 of SEQ ID NOS:263, 265, and 269, which can result in a phenylalanine or serine residue at corresponding aa position 1755 of SEQ ID NOS:264, 266, and 270; and a G/C polymorphism at nt position 5329 of SEQ ID NOS:263, 265, and 269, which can result in a valine or glutamine residue at corresponding aa position 1777 of SEQ ID NOS:264, 266, and 270. The present invention contemplates sequences comprising any and all combinations and permutations of the above polymorphisms.

[0061] An additional application of the described novel human polynucleotide sequences is their use in the molecular mutagenesis/evolution of proteins that are at least partially encoded by the described novel sequences using, for example, polynucleotide shuffling or related methodologies. Such approaches are described in U.S. Pat. Nos. 5,830,721 and 5,837,458.

[0062] Therapeutic gene delivery of the described membrane protein nucleotides can be effected by a variety of methods. For example: methods of retroviral human gene therapy are described in, inter alia, U.S. Pat. Nos. 5,399,346 and 5,858,740; adenoviral vectors for gene therapy/delivery are described in U.S. Pat. No. 5,824,544; adeno-associated viral vectors are described in U.S. Pat. Nos. 5,843,742, 5,780,280, and 5,846,528; herpes virus vectors are described in U.S. Pat. No. 5,830,727; and other vectors and methods of non-viral (e.g., polynucleotides that are not encapsulated by viral capsid protein, “naked” DNA, or DNA formulated in lipid or chemical complexes) introduction of foreign genetic material of recombinant origin into host mammalian, and preferably human, cells are described in U.S. Pat. Nos. 5,827,703 and 5,840,710.

[0063] The described membrane protein gene products can also be expressed in non-human transgenic animals. Animals of any non-human species, including, but not limited to, worms, mice, rats, rabbits, guinea pigs, pigs, micro-pigs, birds, goats, and non-human primates, e.g., baboons, monkeys, and chimpanzees, may be used to generate membrane protein transgenic animals.

[0064] Any technique known in the art may be used to introduce a membrane protein transgene into animals to produce the founder lines of transgenic animals. Such techniques include, but are not limited to, pronuclear microinjection (U.S. Pat. No. 4,873,191), retrovirus-mediated gene transfer into germ lines (Van der Putten et al., Proc. Natl. Acad. Sci. USA 82:6148-6152, 1985), gene targeting in embryonic stem cells (Thompson et al., Cell 56:313-321, 1989), electroporation of embryos (Lo, Mol. Cell. Biol. 3:1803-1814, 1983), and sperm-mediated gene transfer (Lavitrano et al., Cell 57:717-723, 1989), etc. For a review of such techniques, see, e.g., Gordon, Intl. Rev. Cytol. 115:171-229, 1989.

[0065] The present invention provides for transgenic animals that carry a membrane protein transgene in all their cells, as well as animals that carry a transgene in some, but not all their cells, i.e., mosaic animals or somatic cell transgenic animals. A transgene may be integrated as a single transgene, or in concatamers, e.g., head-to-head tandems or head-to-tail tandems. A transgene may also be selectively introduced into and activated in a particular cell-type by following, for example, the teaching of Lasko et al., Proc. Natl. Acad. Sci. USA 89:6232-6236, 1992. The regulatory sequences required for such a cell-type specific activation will depend upon the particular cell-type of interest, and will be apparent to those of skill in the art.

[0066] When it is desired that a membrane protein transgene be integrated into the chromosomal site of the endogenous membrane protein gene, gene targeting is preferred. Briefly, when such a technique is to be utilized, vectors containing some nucleotide sequences homologous to the endogenous membrane protein gene are designed for the purpose of integrating, via homologous recombination with chromosomal sequences, into and disrupting the function of the nucleotide sequence of the endogenous membrane protein gene (i.e., “knockout” animals).

[0067] The transgene can also be selectively introduced into a particular cell-type, thus inactivating the endogenous membrane protein gene in only that cell-type, by following, for example, the teaching of Gu et al., Science 265:103-106, 1994. The regulatory sequences required for such a cell-type specific inactivation will depend upon the particular cell-type of interest, and will be apparent to those of skill in the art.

[0068] Once transgenic animals have been generated, the expression of the recombinant membrane protein gene may be assayed utilizing standard techniques. Initial screening may be accomplished by Southern blot analysis or PCR techniques to analyze animal tissues to assay whether integration of the transgene has taken place. The level of mRNA expression of the transgene in the tissues of the transgenic animals may also be assessed using techniques that include, but are not limited to, Northern blot analysis of tissue samples obtained from the animal, in situ hybridization analysis, and RT-PCR. Samples of membrane protein gene-expressing tissue may also be evaluated immunocytochemically using antibodies specific for the membrane protein transgene product.

[0069] The present invention also provides for “knock-in” animals. Knock-in animals are those in which a polynucleotide sequence (i.e., a gene or a cDNA) that the animal does not naturally have in its genome is inserted in such a way that it is expressed. Examples include, but are not limited to, a human gene or cDNA used to replace its murine ortholog in the mouse, a murine cDNA used to replace the murine gene in the mouse, and a human gene or cDNA or murine cDNA that is tagged with a reporter construct used to replace the murine ortholog or gene in the mouse. Such replacements can occur at the locus of the murine ortholog or gene, or at another specific site. Such knock-in animals are useful for the in vivo study, testing and validation of, intra alia, human drug targets, as well as for compounds that are directed at the same, and therapeutic proteins.

### 7.2 Membrane Protein Amino Acid Sequences

[0070] The described membrane proteins, polypeptides, peptide fragments, mutated, truncated, or deleted forms of the membrane proteins, and/or membrane protein fusion proteins can be prepared for a variety of uses. These uses include, but are not limited to, the generation of antibodies, as reagents in diagnostic assays, for the identification of other cellular gene products related to a membrane protein, and as reagents in assays for screening for compounds that can be used as pharmaceutical reagents useful in the therapeutic treatment of mental, biological, or medical disorders and diseases. Given the similarity information and expression data, the described membrane proteins can be targeted (by drugs, oligonucleotides, antibodies, etc.) in order to diagnose or treat disease, or to therapeutically supplant or augment the efficacy of, for example, chemotherapeutic agents used in the treatment of cancer (for example breast or prostate cancer), therapeutic agents used in the treatment of abnormal blood pressure, heart disease, diabetes, inflammatory disorders, arthritis, Alzheimer's disease, neurodegenerative diseases such as Parkinson's disease, stroke, vascular dementia, conditions requiring modulation of fat and cholesterol metabolism such as coronary artery disease, infectious disease, as antiviral agents, or to promote healing.

[0071] The Sequence Listing discloses the amino acid sequences encoded by the described membrane protein nucleic acid sequences. The membrane proteins display initiator methionines in DNA sequence contexts consistent with translation initiation sites, and most contain signal-like sequences often associated with membrane-associated or secreted proteins.

[0072] The membrane protein amino acid sequences of the invention include the amino acid sequence presented in the Sequence Listing, as well as analogues and derivatives thereof. Further, corresponding membrane protein homologues from other species are encompassed by the invention. In fact, any membrane protein encoded by the membrane protein nucleotide sequences described herein are within the scope of the invention, as are any novel polynucleotide sequences encoding all or any novel portion of an amino acid sequence presented in the Sequence Listing. The degenerate nature of the genetic code is well-known, and, accordingly, each amino acid presented in the Sequence Listing is generically representative of the well-known nucleic acid “triplet” codon, or in many cases codons, that can encode the amino acid. As such, as contemplated herein, the amino acid sequences presented in the Sequence Listing, when taken together with the genetic code (see, for example, “Molecular Cell Biology”, Table 4-1 at page 109 (Darnell et al., eds., Scientific American Books, New York, N.Y., 1986)), are generically representative of all the various permutations and combinations of nucleic acid sequences that can encode such amino acid sequences.

[0073] The invention also encompasses proteins that are functionally equivalent to the membrane proteins encoded by the presently described nucleotide sequences as judged by any of a number of criteria, including, but not limited to, the ability to bind and cleave a substrate of a membrane protein, the ability to effect an identical or complementary downstream pathway, or a change in cellular metabolism (e.g., proteolytic activity, ion flux, tyrosine phosphorylation, etc.). Such functionally equivalent membrane proteins include, but are not limited to, additions or substitutions of amino acid residues within the amino acid sequence encoded by the membrane protein nucleotide sequences described herein, but that result in a silent change, thus producing a functionally equivalent expression product. Amino acid substitutions may be made on the basis of similarity in polarity, charge, solubility, hydrophobicity, hydrophilicity, and/or the amphipathic nature of the residues involved. For example, nonpolar (hydrophobic) amino acids include alanine, leucine, isoleucine, valine, proline, phenylalanine, tryptophan, and methionine; polar neutral amino acids include glycine, serine, threonine, cysteine, tyrosine, asparagine, and glutamine; positively charged (basic) amino acids include arginine, lysine, and histidine; and negatively charged (acidic) amino acids include aspartic acid and glutamic acid.

[0074] A variety of host-expression vector systems can be used to express the membrane protein nucleotide sequences of the invention. Where, as in the present instance, the membrane protein, peptide, or polypeptide is thought to be a membrane (or possibly secreted or membrane-associated) protein, the hydrophobic regions of the protein can be excised and the resulting soluble peptide or polypeptide can be recovered from the culture media. Such expression systems also encompass engineered host cells that express a membrane protein, or functional equivalent, in situ. Purification or enrichment of a membrane protein from such expression systems can be accomplished using appropriate detergents and lipid micelles and methods well-known to those skilled in the art. However, such engineered host cells themselves may be used in situations where it is important not only to retain the structural and functional characteristics of a membrane protein, but to assess biological activity, e.g., in certain drug screening assays.

[0075] The expression systems that may be used for purposes of the invention include, but are not limited to, microorganisms such as bacteria (e.g., E. coli, B. subtilis) transformed with recombinant bacteriophage DNA, plasmid DNA or cosmid DNA expression vectors containing membrane protein nucleotide sequences; yeast (e.g., Saccharomyces, Pichia) transformed with recombinant yeast expression vectors containing membrane protein nucleotide sequences; insect cell systems infected with recombinant virus expression vectors (e.g., baculovirus) containing membrane protein nucleotide sequences; plant cell systems infected with recombinant virus expression vectors (e.g., cauliflower mosaic virus, CaMV; tobacco mosaic virus, TMV) or transformed with recombinant plasmid expression vectors (e.g., Ti plasmid) containing membrane protein nucleotide sequences; or mammalian cell systems (e.g., COS, CHO, BHK, 293, 3T3) harboring recombinant expression constructs containing membrane protein nucleotide sequences and promoters derived from the genome of mammalian cells (e.g., metallothionein promoter) or from mammalian viruses (e.g., the adenovirus late promoter; the vaccinia virus 7.5K promoter).

[0076] In bacterial systems, a number of expression vectors may be advantageously selected depending upon the use intended for the membrane protein product being expressed. For example, when a large quantity of such a protein is to be produced for the generation of pharmaceutical compositions of or containing a membrane protein, or for raising antibodies to a membrane protein, vectors that direct the expression of high levels of fusion protein products that are readily purified may be desirable. Such vectors include, but are not limited to, the E. coli expression vector pUR278 (Ruther and Muller-Hill, EMBO J. 2:1791-1794, 1983), in which a membrane protein coding sequence may be ligated individually into the vector in frame with the lacZ coding region so that a fusion protein is produced, pIN vectors (Inouye and Inouye, Nucl. Acids Res. 13:3101-3109, 1985; Van Heeke and Schuster, J. Biol. Chem. 264:5503-5509, 1989), and the like. pGEX vectors (Pharmacia or American Type Culture Collection) can also be used to express foreign polypeptides as fusion proteins with glutathione S-transferase (GST). In general, such fusion proteins are soluble and can easily be purified from lysed cells by adsorption to glutathione-agarose beads followed by elution in the presence of free glutathione. The pGEX vectors are designed to include thrombin or factor Xa protease cleavage sites so that the cloned target expression product can be released from the GST moiety.

[0077] In an exemplary insect system, Autographa californica nuclear polyhedrosis virus (AcNPV) is used as a vector to express foreign polynucleotide sequences. The virus grows in Spodoptera frugiperda cells. A membrane protein coding sequence can be cloned individually into a non-essential region (for example the polyhedrin gene) of the virus and placed under control of an AcNPV promoter (for example the polyhedrin promoter). Successful insertion of a membrane protein coding sequence will result in inactivation of the polyhedrin gene and production of non-occluded recombinant virus (i.e., virus lacking the proteinaceous coat coded for by the polyhedrin gene). These recombinant viruses are then used to infect Spodoptera frugiperda cells in which the inserted sequence is expressed (see, e.g., Smith et al., J. Virol. 46:584-593, 1983, and U.S. Pat. No. 4,215,051).

[0078] In mammalian host cells, a number of viral-based expression systems may be utilized. In cases where an adenovirus is used as an expression vector, the membrane protein nucleotide sequence of interest may be ligated to an adenovirus transcription/translation control complex, e.g., the late promoter and tripartite leader sequence. This chimeric sequence may then be inserted in the adenovirus genome by in vitro or in vivo recombination. Insertion in a non-essential region of the viral genome (e.g., region E1 or E3) will result in a recombinant virus that is viable and capable of expressing a membrane protein product in infected hosts (see, e.g., Logan and Shenk, Proc. Natl. Acad. Sci. USA 81:3655-3659, 1984). Specific initiation signals may also be required for efficient translation of inserted membrane protein nucleotide sequences. These signals include the ATG initiation codon and adjacent sequences. In cases where an entire membrane protein gene or cDNA, including its own initiation codon and adjacent sequences, is inserted into the appropriate expression vector, no additional translational control signals may be needed. However, in cases where only a portion of a membrane protein coding sequence is inserted, exogenous translational control signals, including, perhaps, the ATG initiation codon, may be provided. Furthermore, the initiation codon should be in phase with the reading frame of the desired coding sequence to ensure translation of the entire insert. These exogenous translational control signals and initiation codons can be of a variety of origins, both natural and synthetic. The efficiency of expression may be enhanced by the inclusion of appropriate transcription enhancer elements, transcription terminators, etc. (see, e.g., Bitter et al., Methods in Enzymol. 153:516-544, 1987).

[0079] In addition, a host cell strain may be chosen that modulates the expression of the inserted sequences, or modifies and processes the expression product in the specific fashion desired. Such modifications (e.g., glycosylation) and processing (e.g., cleavage) of protein products may be important for the function of the protein. Different host cells have characteristic and specific mechanisms for the post-translational processing and modification of proteins and expression products. Appropriate cell lines or host systems can be chosen to ensure the desired modification and processing of the foreign protein expressed. To this end, eukaryotic host cells that possess the cellular machinery for the desired processing of the primary transcript, glycosylation, and phosphorylation of the expression product may be used. Such mammalian host cells include, but are not limited to, CHO, VERO, BHK, HeLa, COS, MDCK, 293, 3T3, WI38, and in particular, human cell lines.

[0080] For long-term, high-yield production of recombinant proteins, stable expression is preferred. For example, cell lines that stably express the membrane protein sequences described herein can be engineered. Rather than using expression vectors that contain viral origins of replication, host cells can be transformed with DNA controlled by appropriate expression control elements (e.g., promoter, enhancer sequences, transcription terminators, polyadenylation sites, etc.), and a selectable marker. Following the introduction of the foreign DNA, engineered cells may be allowed to grow for 1-2 days in an enriched media, and then switched to a selective media. The selectable marker in the recombinant plasmid confers resistance to the selection and allows cells to stably integrate the plasmid into their chromosomes and grow to form foci, which in turn can be cloned and expanded into cell lines. This method may advantageously be used to engineer cell lines that express a membrane protein product. Such engineered cell lines may be particularly useful in screening and evaluation of compounds that affect the endogenous activity of a membrane protein product.

[0081] A number of selection systems may be used, including, but not limited to, the herpes simplex virus thymidine kinase (Wigler et al., Cell 11:223-232, 1977), hypoxanthine-guanine phosphoribosyltransferase (Szybalska and Szybalski, Proc. Natl. Acad. Sci. USA 48:2026-2034, 1962), and adenine phosphoribosyltransferase (Lowy et al., Cell 22:817-823, 1980) genes, which can be employed in tk⁻, hgprt⁻ or aprt⁻ cells, respectively. Also, antimetabolite resistance can be used as the basis of selection for the following genes: dihydrofolate reductase (dhfr), which confers resistance to methotrexate (Wigler et al., Proc. Natl. Acad. Sci. USA 77:3567-3570, 1980, and O'Hare et al., Proc. Natl. Acad. Sci. USA 78:1527-1531, 1981); guanine phosphoribosyl transferase (gpt), which confers resistance to mycophenolic acid (Mulligan and Berg, Proc. Natl. Acad. Sci. USA 78:2072-2076, 1981); neomycin phosphotransferase (neo), which confers resistance to G-418 (Colbere-Garapin et al., J. Mol. Biol. 150:1-14, 1981); and hygromycin B phosphotransferase (hpt), which confers resistance to hygromycin (Santerre et al., Gene 30:147-156, 1984).

[0082] Alternatively, any fusion protein can be readily purified by utilizing an antibody specific for the fusion protein being expressed. Another exemplary system allows for the ready purification of non-denatured fusion proteins expressed in human cell lines (Janknecht et al., Proc. Natl. Acad. Sci. USA 88:8972-8976, 1991). In this system, the sequence of interest is subcloned into a vaccinia recombination plasmid such that the sequence's open reading frame is translationally fused to an amino-terminal tag consisting of six histidine residues. Extracts from cells infected with recombinant vaccinia virus are loaded onto Ni²⁺•nitriloacetic acid-agarose columns, and histidine-tagged proteins are selectively eluted with imidazole-containing buffers.

[0083] Also encompassed by the present invention are fusion proteins that direct a membrane protein to a target organ and/or facilitate transport across the membrane into the cytosol. Conjugation of membrane proteins to antibody molecules or their Fab fragments could be used to target cells bearing a particular epitope. Attaching an appropriate signal sequence to a membrane protein would also transport a membrane protein to a desired location within the cell. Alternatively targeting of a membrane protein or its nucleic acid sequence might be achieved using liposome or lipid complex based delivery systems. Such technologies are described in “Liposomes: A Practical Approach” (New, R. R. C., ed., IRL Press, New York, N.Y., 1990), and in U.S. Pat. Nos. 4,594,595, 5,459,127, 5,948,767 and 6,110,490. Additionally embodied are novel protein constructs engineered in such a way that they facilitate transport of membrane proteins to a target site or desired organ, where they cross the cell membrane and/or the nucleus where the membrane proteins can exert their functional activity. This goal may be achieved by coupling of a membrane protein to a cytokine or other ligand that provides targeting specificity, and/or to a protein transducing domain (see generally U.S. Provisional Patent Application Ser. Nos. 60/111,701 and 60/056,713 for examples of such transducing sequences), to facilitate passage across cellular membranes, and can optionally be engineered to include nuclear localization signals.

[0084] Additionally contemplated are oligopeptides that are modeled on an amino acid sequence first described in the Sequence Listing. Such membrane protein oligopeptides are generally between about 10 to about 100 amino acids long, or between about 16 to about 80 amino acids long, or between about 20 to about 35 amino acids long, or any variation or combination of sizes represented therein that incorporate a contiguous region of sequence first disclosed in the Sequence Listing. Such membrane protein oligopeptides can be of any length disclosed within the above ranges and can initiate at any amino acid position represented in the Sequence Listing.

[0085] The invention also contemplates “substantially isolated” or “substantially pure” proteins or polypeptides. By a “substantially isolated” or “substantially pure” protein or polypeptide is meant a protein or polypeptide that has been separated from at least some of those components that naturally accompany it. Typically, the protein or polypeptide is substantially isolated or pure when it is at least 60%, by weight, free from the proteins and other naturally-occurring organic molecules with which it is naturally associated in vivo. Preferably, the purity of the preparation is at least 75%, more preferably at least 90%, and most preferably at least 99%, by weight. A substantially isolated or pure protein or polypeptide may be obtained, for example, by extraction from a natural source, by expression of a recombinant nucleic acid encoding the protein or polypeptide, or by chemically synthesizing the protein or polypeptide.

[0086] Purity can be measured by any appropriate method, e.g., column chromatography such as immunoaffinity chromatography using an antibody specific for the protein or polypeptide, polyacrylamide gel electrophoresis, or HPLC analysis. A protein or polypeptide is substantially free of naturally associated components when it is separated from at least some of those contaminants that accompany it in its natural state. Thus, a polypeptide that is chemically synthesized or produced in a cellular system different from the cell from which it naturally originates will be, by definition, substantially free from its naturally associated components. Accordingly, substantially isolated or pure proteins or polypeptides include eukaryotic proteins synthesized in E. coli, other prokaryotes, or any other organism in which they do not naturally occur.

### 7.3 Membrane Protein Antibodies

[0087] Antibodies that specifically recognize one or more epitopes of a membrane protein, epitopes of conserved variants of a membrane protein, or peptide fragments of a membrane protein, are also encompassed by the invention. Such antibodies include, but are not limited to, polyclonal antibodies, monoclonal antibodies (mAbs), humanized or chimeric antibodies, single chain antibodies, Fab fragments, F(ab′)₂ fragments, fragments produced by a Fab expression library, anti-idiotypic (anti-Id) antibodies, and epitope-binding fragments of any of the above.

[0088] The antibodies of the invention may be used, for example, in the detection of a membrane protein in a biological sample and may, therefore, be utilized as part of a diagnostic or prognostic technique whereby patients may be tested for abnormal amounts of a membrane protein. Such antibodies may also be utilized in conjunction with, for example, compound screening schemes for the evaluation of the effect of test compounds on expression and/or activity of a membrane protein expression product. Additionally, such antibodies can be used in conjunction with gene therapy to, for example, evaluate normal and/or engineered membrane protein-expressing cells prior to their introduction into a patient. Such antibodies may additionally be used in methods for the inhibition of abnormal membrane protein activity. Thus, such antibodies may be utilized as a part of treatment methods.

[0089] For the production of antibodies, various host animals may be immunized by injection with a membrane protein, peptide (e.g., one corresponding to a functional domain of a membrane protein), truncated membrane protein polypeptide (a membrane protein in which one or more domains have been deleted), functional equivalents of a membrane protein, or mutated variants of a membrane protein. Such host animals may include, but are not limited to, pigs, rabbits, mice, goats, and rats, to name but a few. Various adjuvants may be used to increase the immunological response, depending on the host species, including, but not limited to, Freund's adjuvant (complete and incomplete), mineral salts such as aluminum hydroxide or aluminum phosphate, chitosan, surface active substances such as lysolecithin, pluronic polyols, polyanions, peptides, oil emulsions, and potentially useful human adjuvants such as BCG (bacille Calmette-Guerin) and Corynebacterium parvum. Alternatively, the immune response could be enhanced by combination and/or coupling with molecules such as keyhole limpet hemocyanin, tetanus toxoid, diphtheria toxoid, ovalbumin, cholera toxin, or fragments thereof. Polyclonal antibodies are heterogeneous populations of antibody molecules derived from the sera of the immunized animals.

[0090] Monoclonal antibodies, which are homogeneous populations of antibodies to a particular antigen, can be obtained by any technique that provides for the production of antibody molecules by continuous cell lines in culture. These include, but are not limited to, the hybridoma technique (Kohler and Milstein, Nature 256:495-497, 1975, and U.S. Pat. No. 4,376,110), the human B-cell hybridoma technique (Kosbor et al., Immunology Today 4:72, 1983, and Cole et al., Proc. Natl. Acad. Sci. USA 80:2026-2030, 1983), and the EBV-hybridoma technique (Cole et al., in “Monoclonal Antibodies and Cancer Therapy”, Vol. 27, UCLA Symposia on Molecular and Cellular Biology, New Series, pp. 77-96 (Reisfeld and Sell, eds., Alan R. Liss, Inc. New York, N.Y., 1985)). Such antibodies may be of any immunoglobulin class, including IgG, IgM, IgE, IgA, and IgD, and any subclass thereof. The hybridomas producing the mAbs of this invention may be cultivated in vitro or in vivo. Production of high titers of mAbs in vivo makes this the presently preferred method of production.

[0091] In addition, techniques developed for the production of “chimeric antibodies” (Morrison et al., Proc. Natl. Acad. Sci. USA 81:6851-6855, 1984, Neuberger et al., Nature 312:604-608, 1984, and Takeda et al., Nature 314:452-454, 1985) by splicing the genes from a mouse antibody molecule of appropriate antigen specificity together with genes from a human antibody molecule of appropriate biological activity can be used. A chimeric antibody is a molecule in which different portions are derived from different animal species, such as those having a variable region derived from a murine mAb and a human immunoglobulin constant region. Such technologies are described in U.S. Pat. Nos. 6,114,598, 6,075,181 and 5,877,397. Also encompassed by the present invention is the use of fully humanized monoclonal antibodies, as described in U.S. Pat. No. 6,150,584.

[0092] Alternatively, techniques described for the production of single chain antibodies (U.S. Pat. No. 4,946,778, Bird, Science 242:423-426, 1988, Huston et al., Proc. Natl. Acad. Sci. USA 85:5879-5883, 1988, and Ward et al., Nature 341:544-546, 1989) can be adapted to produce single chain antibodies against membrane protein expression products. Single chain antibodies are formed by linking the heavy and light chain fragments of the Fv region via an amino acid bridge, resulting in a single chain polypeptide.

[0093] Antibody fragments that recognize specific epitopes may be generated by known techniques. For example, such fragments include, but are not limited to: F(ab′)₂ fragments, which can be produced by pepsin digestion of an antibody molecule; and Fab fragments, which can be generated by reducing the disulfide bridges of F(ab′)₂ fragments. Alternatively, Fab expression libraries may be constructed (Huse et al., Science 246:1275-1281, 1989) to allow rapid and easy identification of monoclonal Fab fragments with the desired specificity.

[0094] Antibodies to a membrane protein can, in turn, be utilized to generate anti-idiotype antibodies that “mimic” a given membrane protein, using techniques well-known to those skilled in the art (see, e.g., Greenspan and Bona, FASEB J. 7:437-444, 1993, and Nissinoff, J. Immunol. 147:2429-2438, 1991). For example, antibodies that bind to a membrane protein domain and competitively inhibit the binding of a membrane protein to its cognate receptor can be used to generate anti-idiotypes that “mimic” the membrane protein and, therefore, bind and activate or neutralize a receptor. Such anti-idiotypic antibodies, or Fab fragments of such anti-idiotypes, can be used in therapeutic regimens involving a membrane protein-mediated pathway.

[0095] Additionally given the high degree of relatedness of mammalian membrane proteins, membrane protein knock-out mice (having never seen a membrane protein, and thus never been tolerized to a membrane protein) have an unique utility, as they can be advantageously applied to the generation of antibodies against the disclosed mammalian membrane proteins (i.e., a membrane protein will be immunogenic in the corresponding membrane protein knock-out animals).

[0096] The present invention is not to be limited in scope by the specific embodiments described herein, which are intended as single illustrations of individual aspects of the invention, and functionally equivalent methods and components are within the scope of the invention. Indeed, various modifications of the invention, in addition to those shown and described herein, will become apparent to those skilled in the art from the foregoing description. Such modifications are intended to fall within the scope of the appended claims. All cited publications, patents, and patent applications are herein incorporated by reference in their entirety.

1. An isolated nucleic acid molecule comprising a nucleotide sequence that encodes the amino acid sequence of SEQ ID NO: 2, 4, 6, 8, 10, 12, 14, 16, 18, 20, 22, 24, 26, 28, 30, 33, 35, 37, 39, 41, 43, 45, 47, 49, 51, 53, 55, 57, 59, 61, 64, 66, 68, 70, 72, 74, 76, 78, 80, 82, 84, 86, 88, 90, 93, 95, 97, 99, 101, 103, 105, 107, 109, 111, 114, 116, 119, 121, 123, 126, 128, 130, 132, 134, 136, 138, 140, 142, 144, 146, 148, 150, 152, 154, 156, 159, 161, 163, 165, 167, 169, 171, 173, 175, 177, 179, 181, 183, 185, 187, 189, 191, 194, 196, 198, 200, 202, 205, 207, 209, 211, 213, 216, 218, 220, 223, 225, 227, 230, 232, 235, 238, 240, 242, 244, 246, 248, 250, 252, 254, 256, 258, 260, 262, 264, 266, 268, or 270.

2. The isolated nucleic acid molecule of claim 1, wherein said nucleic acid molecule comprises the nucleotide sequence of SEQ ID NO: 1, 3, 5, 7, 9, 1, 13, 15, 17, 19, 21, 23, 25, 27, 29, 32, 34, 36, 38, 40, 42, 44, 46, 48, 50, 52, 54, 56, 58, 60, 63, 65, 67, 69, 71, 73, 75, 77, 79, 81, 83, 85, 87, 89, 92, 94, 96, 98, 100, 102, 104, 106, 108, 110, 113, 115, 118, 120, 122, 125, 127, 129, 131, 133, 135, 137, 139, 141, 143, 145, 147, 149, 151, 153, 155, 158, 160, 162, 164, 166, 168, 170, 172, 174, 176, 178, 180, 182, 184, 186, 188, 190, 193, 195, 197, 199, 201, 204, 206, 208, 210, 212, 215, 217, 219, 222, 224, 226, 229, 231, 234, 237, 239, 241, 243, 245, 247, 249, 251, 253, 255, 257, 259, 261, 263, 265, 267, or 269.

3. An expression vector comprising the isolated nucleic acid molecule of claim 1.

4. An isolated polypeptide comprising the amino acid sequence of SEQ ID NO: 2, 4, 6, 8, 10, 12, 14, 16, 18, 20, 22, 24, 26, 28, 30, 33, 35, 37, 39, 41, 43, 45, 47, 49, 51, 53, 55, 57, 59, 61, 64, 66, 68, 70, 72, 74, 76, 78, 80, 82, 84, 86, 88, 90, 93, 95, 97, 99, 101, 103, 105, 107, 109, 111, 114, 116, 119, 121, 123, 126, 128, 130, 132, 134, 136, 138, 140, 142, 144, 146, 148, 150, 152, 154, 156, 159, 161, 163, 165, 167, 169, 171, 173, 175, 177, 179, 181, 183, 185, 187, 189, 191, 194, 196, 198, 200, 202, 205, 207, 209, 211, 213, 216, 218, 220, 223, 225, 227, 230, 232, 235, 238, 240, 242, 244, 246, 248, 250, 252, 254, 256, 258, 260, 262, 264, 266, 268, or 270.

5. An antibody that selectively binds a polypeptide drawn from the group consisting of: SEQ ID NO: 2, 4, 6, 8, 10, 12, 14, 16, 18, 20, 22, 24, 26, 28, 30, 33, 35, 37, 39, 41, 43, 45, 47, 49, 51, 53, 55, 57, 59, 61, 64, 66, 68, 70, 72, 74, 76, 78, 80, 82, 84, 86, 88, 90, 93, 95, 97, 99, 101, 103, 105, 107, 109, 111, 114, 116, 119, 121, 123, 126, 128, 130, 132, 134, 136, 138, 140, 142, 144, 146, 148, 150, 152, 154, 156, 159, 161, 163, 165, 167, 169, 171, 173, 175, 177, 179, 181, 183, 185, 187, 189, 191, 194, 196, 198, 200, 202, 205, 207, 209, 211, 213, 216, 218, 220, 223, 225, 227, 230, 232, 235, 238, 240, 242, 244, 246, 248, 250, 252, 254, 256, 258, 260, 262, 264, 266, 268, or 270.

6. An oligonucleotide that inhibits the expression of a nucleic acid molecule that encodes an amino acid sequence drawn from the group consisting of: SEQ ID NO: 2, 4, 6, 8, 10, 12, 14, 16, 18, 20, 22, 24, 26, 28, 30, 33, 35, 37, 39, 41, 43, 45, 47, 49, 51, 53, 55, 57, 59, 61, 64, 66, 68, 70, 72, 74, 76, 78, 80, 82, 84, 86, 88, 90, 93, 95, 97, 99, 101, 103, 105, 107, 109, 111, 114, 116, 119, 121, 123, 126, 128, 130, 132, 134, 136, 138, 140, 142, 144, 146, 148, 150, 152, 154, 156, 159, 161, 163, 165, 167, 169, 171, 173, 175, 177, 179, 181, 183, 185, 187, 189, 191, 194, 196, 198, 200, 202, 205, 207, 209, 211, 213, 216, 218, 220, 223, 225, 227, 230, 232, 235, 238, 240, 242, 244, 246, 248, 250, 252, 254, 256, 258, 260, 262, 264, 266, 268, or 270.

The application's sequence listing, which the Patent Office published only in electronic form, follows.

SEQUENCE LISTING (270 sequences)

SEQ ID NO: 1 - DNA, 876 bp, Homo sapiens
  CDS (1)...(876)
atgtcagccctcaactggaagccgtttgtgtacggggggctggcctccatcactgctgagtgcggtacatttccaattgatttaaccaagacacggctccagattcaaggccagacgaatgatgcaaaatttaaggaaattagataccgaggaatgttgcacgcattagtgaggataggcagagaagaagggctgaaagcactctactcggggattgcccccgcgatgttacgccaggcatcctatggcaccatcaagataggcacttaccagagcttgaagcgactattcattgaacgcccagaagatgaaactctaccgataaatgtgatatgtggaattctgtctggagtcatatcttcaaccattgctaatccaactgatgttttgaaaattcggatgcaagcgcaaagcaacaccattcaaggaggaatgataggcaacttcatgaacatttaccagcaagaggggacaagaggactgtggaagggtgtgtcccttactgcgcagagggctgctattgttgttggtgtggagctgccggtctatgacatcaccaagaagcatcttattctctcaggcctgatgggagacactgtgtatacccacttcctctcaagcttcacctgtggtctggcaggggccctggcctcaaaccctgttgatgttgtgaggacacgtatgatgaatcagagagtgcttcgagatggcagatgttctggctacacaggaaccctggattgcttgttacagacatggaagaatgaagggttttttgctctctataaaggcttttggccaaattggttgagacttggtccttggaatatcattttctttgtgacatacgagcagttgaagaaattggatttgtga

SEQ ID NO: 2 - protein, 291 aa, Homo sapiens
MSALNWKPFVYGGLASITAECGTFPIDLTKTRLQIQGQTNDAKFKEIRYRGMLHALVRIGREEGLKALYSGIAPAMLRQASYGTIKIGTYQSLKRLFIERPEDETLPINVICGILSGVISSTIANPTDVLKIRMQAQSNTIQGGMIGNFMNIYQQEGTRGLWKGVSLTAQRAAIVVGVELPVYDITKKHLILSGLMGDTVYTHFLSSFTCGLAGALASNPVDVVRTRMMNQRVLRDGRCSGYTGTLDCLLQTWKNEGFFALYKGFWPNWLRLGPWNIIFFVTYEQLKKLDL

SEQ ID NO: 3 - DNA, 882 bp, Homo sapiens
  CDS (1)...(882)
atgtcagccctcaactggaagccgtttgtgtacggggggctggcctccatcactgctgagtgcggtacatttccaattgatttaaccaagacacggctccagattcaaggccagacgaatgatgcaaaatttaaggaaattagataccgaggaatgttgcacgcattagtgaggataggcagagaagaagggctgaaagcactctactcggggattgcccccgcgatgttacgccaggcatcctatggcaccatcaagataggcacttaccagagcttgaagcgactattcattgaacgcccagaagatgaaactctaccgataaatgtgatatgtggaattctgtctggagtcatatcttcaaccattgctaatccaactgatgttttgaaaattcggatgcaagcgcaaagcaacaccattcaaggaggaatgataggcaacttcatgaacatttaccagcaagaggggacaagaggactgtggaagggtgtgtcccttactgcgcagagggctgctattgttgttggtgtggagctgccggtctatgacatcaccaagaagcatcttattctctcaggcctgatgggagacactgtgtatacccacttcctctcaagcttcacctgtggtctggcaggggccctggcctcaaaccctgttgatgttgtgaggacacgtatgatgaatcagagagtgcttcgagatggcagatgttctggctacacaggaaccctggattgcttgttacagcttacagtgctggaaagtttttccaccacagcaaagccacaaaagcttatcagcgtagatgccatctcagaagaggctgataccaggggatttacatatctcagctgtgatctttctgctccaagctga

SEQ ID NO: 4 - protein, 293 aa, Homo sapiens
MSALNWKPFVYGGLASITAECGTFPIDLTKTRLQIQGQTNDAKFKEIRYRGMLHALVRIGREEGLKALYSGIAPAMLRQASYGTIKIGTYQSLKRLFIERPEDETLPINVICGILSGVISSTIANPTDVLKIRMQAQSNTIQGGMIGNFMNIYQQEGTRGLWKGVSLTAQRAAIVVGVELPVYDITKKHLILSGLMGDTVYTHFLSSFTCGLAGALASNPVDVVRTRMMNQRVLRDGRCSGYTGTLDCLLQLTVLESFSTTAKPQKLISVDAISEEADTRGFTYLSCDLSAPS

SEQ ID NO: 5 - DNA, 1758 bp, Homo sapiens
  CDS (1)...(1758)
atgcactgcctgggcgccgagtacctggtgtttatcatgggctactcggtggtggctggagccgcgggaagactcctctttggctatgacagctttggcaacatgtgtggcaagaagaactcccccgtggaaggggcccctctttcagggcaggacatgaccctaaaaaaacacgtgttctttatgaattcctgcaacctggaagtcaaagggtccttcctgtgtgtttatagtttgaattccttcaactacacccacagtccaaaagcagactcactgtgtcccaggctaccagttcctccaagcaagtcatttcccttatttaaccgatgtgtccctcaaacacctgagtgctactccctatttgcatctgttttgataaatgatgttgacaccctccaccgaattctaagtggaatcatgtcgggaagagatacaatccttggcctgtgtatcctcgcattagccttgtctttggccatgatgtttaccttcagattcatcaccacccttctggttcacattttcatttcattggttattttgggattgttgtttgtctgcggtgttttatggtggctgtattatgactataccaacgacctcagcatagaattggacacagaaagggaaaatatgaagtgcgtgctggggtttgctatcgtatccacaggcatcacggcagtgctgctcgtcttgatttttgttctcagaaagagaataaaattgacagttgagcttttccaaatcacaaataaagccatcagcagtgctcccttcctgctgttccagccactgtggacatttgccatcctcattttcttctgggtcctctgggtggctgtgctgctgagcctgggaactgcaggagctgcccaggttatggaaggcggccaagtggaatataagcccctttcgggcattcggtacatgtggtcgtaccatttaattggcctcatctggactagtgaattcatccttgcgtgccagcaaatgactatagctggggcagtggttacttgttatttcaacagaagtaaaaatgatcctcctgatcatcccatcctttcgtctctctccattctcttcttctaccatcaaggaaccrttgtgaaagggtcatttttaatctctgtggtgaggattccgagaatcattgtcatgtacatgcaaaacgcactgaaagaacagcagcatggtgcattgtccaggtacctgttccgatgctgctactgctgtttctggtgtcttgacaaatacctgctccatctcaaccagaatgcatatactacaactgctattaatgggacagatttctgtacatcagcaaaagatgcattcaaaatcttgtccaagaactcaagtcactttacatctattaactgctttggagacttcataatttttctaggaaaggtgttagtggtgtgtttcactgtttttggaggactcatggcttttaactacaatcgggcattccaggtgtgggcagtccctctgttattggtagctttttttgcctacttagtagcccatagttttttatctgtgtttgaaactgtgctggatgcacttttcctgtgttttgctgttgatctggaaacaaatgatggatcgtcagaaaagccctactttatggatcaagaatttctgagtttcgtaaaaaggagcaacaaattaaacaatgcaagggcacagcaggacaagcactcattaaggaatgaggagggaacagaactccaggccattgtgagatag

SEQ ID NO: 6 - protein, 585 aa, Homo sapiens
  VARIANT (1)...(585): Xaa = Any Amino Acid
MHCLGAEYLVFIMGYSVVAGAAGRLLFGYDSFGNMCGKKNSPVEGAPLSGQDMTLKKHVFFMNSCNLEVKGSFLCVYSLNSFNYTHSPKADSLCPRLPVPPSKSFPLFNRCVPQTPECYSLFASVLINDVDTLHRILSGIMSGRDTILGLCILALALSLAMMFTFRFITTLLVHIFISLVILGLLFVCGVLWWLYYDYTNDLSIELDTERENMKCVLGFAIVSTGITAVLLVLIFVLRKRIKLTVELFQITNKAISSAPFLLFQPLWTFAILIFFWVLWVAVLLSLGTAGAAQVMEGGQVEYKPLSGIRYMWSYHLIGLIWTSEFILACQQMTIAGAVVTCYFNRSKNDPPDHPILSSLSILFFYHQGTXVKGSFLISVVRIPRIIVMYMQNALKEQQHGALSRYLFRCCYCCFWCLDKYLLHLNQNAYTTTAINGTDFCTSAKDAFKILSKNSSHFTSINCFGDFIIFLGKVLVVCFTVFGGLMAFNYNRAFQVWAVPLLLVAFFAYLVAHSFLSVFETVLDALFLCFAVDLETNDGSSEKPYFMDQEFLSFVKRSNKLNNARAQQDKHSLRNEEGTELQAIVR

SEQ ID NO: 7 - DNA, 1755 bp, Homo sapiens
  CDS (1)...(1755)
atgcactgcctgggcgccgagtacctggtgtttatcatgggctactcggtggtggctggagccgcgggaagactcctctttggctatgacagctttggcaacatgtgtggcaagaagaactcccccgtggaaggggcccctctttcagggcaggacatgaccctaaaaaaacacgtgttctttatgaattcctgcaacctggaagtcaaagggtccttcctgtgtgtttatagtttgaattccttcaactacacccacagtccaaaagcagactcactgtgtcccaggctaccagttcctccaagcaagtcatttcccttatttaaccgatgtgtccctcaaacacctgagtgctactccctatttgcatctgttttgataaatgatgttgacaccctccaccgaattctaagtggaatcatgtcgggaagagatacaatccttggcctgtgtatcctcgcattagccttgtctttggccatgatgtttaccttcagattcatcaccacccttctggttcacattttcatttcattggttattttgggattgttgtttgtctgcggtgttttatggtggctgtattatgactataccaacgacctcagcatagaattggacacagaaagggaaaatatgaagtgcgtgctggggtttgctatcgtatccacaggcatcacggcagtgctgctcgtcttgatttttgttctcagaaagagaataaaattgacagttgagcttttccaaatcacaaataaagccatcagcagtgctcccttcctgctgttccagccactgtggacatttgccatcctcattttcttctgggtcctctgggtggctgtgctgctgagcctgggaactgcaggagctgcccaggttatggaaggcggccaagtggaatataagcccctttcgggcattcggtacatgtggtcgtaccatttaattggcctcatctggactagtgaattcatccttgcgtgccagcaaatgactatagctggggcagtggttacttgttatttcaacagaagtaaaaatgatcctcctgatcatcccatcctttcgtctctctccattctcttcttctaccatcaaggaaccrttgtgaaagggtcatttttaatctctgtggtgaggattccgagaatcattgtcatgtacatgcaaaacgcactgaaagaacagcatggtgcattgtccaggtacctgttccgatgctgctactgctgtttctggtgtcttgacaaatacctgctccatctcaaccagaatgcatatactacaactgctattaatgggacagatttctgtacatcagcaaaagatgcattcaaaatcttgtccaagaactcaagtcactttacatctattaactgctttggagacttcataatttttctaggaaaggtgttagtggtgtgtttcactgtttttggaggactcatggcttttaactacaatcgggcattccaggtgtgggcagtccctctgttattggtagctttttttgcctacttagtagcccatagttttttatctgtgtttgaaactgtgctggatgcacttttcctgtgttttgctgttgatctggaaacaaatgatggatcgtcagaaaagccctactttatggatcaagaatttctgagtttcgtaaaaaggagcaacaaattaaacaatgcaagggcacagcaggacaagcactcattaaggaatgaggagggaacagaactccaggccattgtgagatag

SEQ ID NO: 8 - protein, 584 aa, Homo sapiens
  VARIANT (1)...(584): Xaa = Any Amino Acid
MHCLGAEYLVFIMGYSVVAGAAGRLLFGYDSFGNMCGKKNSPVEGAPLSGQDMTLKKHVFFMNSCNLEVKGSFLCVYSLNSFNYTHSPKADSLCPRLPVPPSKSFPLFNRCVPQTPECYSLFASVLINDVDTLHRILSGIMSGRDTILGLCILALALSLAMMFTFRFITTLLVHIFISLVILGLLFVCGVLWWLYYDYTNDLSIELDTERENMKCVLGFAIVSTGITAVLLVLIFVLRKRIKLTVELFQITNKAISSAPFLLFQPLWTFAILIFFWVLWVAVLLSLGTAGAAQVMEGGQVEYKPLSGIRYMWSYHLIGLIWTSEFILACQQMTIAGAVVTCYFNRSKNDPPDHPILSSLSILFFYHQGTXVKGSFLISVVRIPRIIVMYMQNALKEQHGALSRYLFRCCYCCFWCLDKYLLHLNQNAYTTTAINGTDFCTSAKDAFKILSKNSSHFTSINCFGDFIIFLGKVLVVCFTVFGGLMAFNYNRAFQVWAVPLLLVAFFAYLVAHSFLSVFETVLDALFLCFAVDLETNDGSSEKPYFMDQEFLSFVKRSNKLNNARAQQDKHSLRNEEGTELQAIVR

SEQ ID NO: 9 - DNA, 2070 bp, Homo sapiens
  CDS (1)...(2070)
atgaagcccttgtctctgttaatagagatattgataattcttggggtcacaattaaaactatcaaagcagaggaacataataaaagacaaaaggaaagaaatgtcaccacacaggtatcagtgaacgaaatcaaacaatatttatcacacatattggaacaaagaacatctagtaatgtaatcaataaaagagaaaatctcctggagaaaaagaagaatcaacgtaaaataagaataaaaggaattcaaaataaagatatcttgaagagaaataagaatcatttacaaaagcaagcagagaaaaattttacagatgaaggagaccagctatttaagatgggcatcaaggttctccagcagtctaaaagccaaaaacaaaaagaagaagcctacctactttttgccaaagcagctgacatgggaaacttgaaagctatggagaaaatggctgacgctttgctatttggaaattttggcgtgcaaaatataacagcagctatccaattatatgagtccttggctaaagaaggatcatgtaaagcccaaaacgcattaggatttttgtcttcttatggaataggaatggaatatgatcaagctaaggcactgatatattacacctttggaagtgctggaggaaacatgatgtcccagatgattttggggtacagatatttgtcgggaatcaatgttctacagaattgtgaagttgccctaagttattacaagaaagtggcagattatattgctgacacatttgaaaaaagtgaaggtgttccagtggaaaaagtgagactaacggaaagacctgaaaatctgagttctaacagtgagattttggattgggacatataccaatactataaatttttggcagaaagaggagatgttcagatacaagtctctcttggacaattacatctaattggcaggaaaggtctagatcaggattactacaaagcattacactacttcttaaaggcagcaaaggccgggagtgcaaatgccatggcatttataggaaagatgtatttagaggggaatgctgccgtgccgcaaaataacgctactgccttcaagtacttttccatggcagccagtaagggcaatgcaatcggccttcatgggcttggtcttctttactttcatggaaaaggagttcccctgaattatgccraagcacttaaatactttcagaaagctgcggaaaaagggtggcccgacgcacagttccagttaggcttcatgtactactctggctctggaatatggaaggattataaacttgccttcaaatatttttacctggcatctcagagtgggcagcccctcgccatttattatctggccaagatgtatgcaacaggaacaggagtagtaagatcatgcagaactgctgtggagctttataaaggtgtctgtgaactaggccactgggctgagaaattcctgacagcttactttgcctataaggatggtgatatagattcttctcttgttcagtatgcactgcttgcagaaatggggtatgaagtagctcaaagcaattcagcattcattttggaatctaaaaaggctaacattcttgaaaaagagaagatgtatccaatggcgcttctcctatggaatcgagctgccattcaaggcaatgcatttgctagagtaaaaattggagattaccattactatggctatgggactaagaaagactatcaaacagcagccacacactacagcattgcagccaacaaataccacaacgcgcaagccatgttcaatctggcttatatgtatgaacacggcttaggcatcacaaaggacattcacttggccagaagattgtacgacatggctgctcaaacgagtccagatgcccacatacctgtgctctttgccgtcatgaaactggaaactacgcatttgctccgggatatcctgttttttaatcagttcacaacgagatggaactggctgaaactggacaacaccattggaccacactgggacttatttgtgattggcctcattgttcctgggctgattttgttgcttagaaatcaccatgggtag

SEQ ID NO: 10 - protein, 689 aa, Homo sapiens
  VARIANT (1)...(689): Xaa = Any Amino Acid
MKPLSLLIEILIILGVTIKTIKAEEHNKRQKERNVTTQVSVNEIKQYLSHILEQRTSSNVINKRENLLEKKKNQRKIRIKGIQNKDILKRNKNHLQKQAEKNFTDEGDQLFKMGIKVLQQSKSQKQKEEAYLLFAKAADMGNLKAMEKMADALLFGNFGVQNITAAIQLYESLAKEGSCKAQNALGFLSSYGIGMEYDQAKALIYYTFGSAGGNMMSQMILGYRYLSGINVLQNCEVALSYYKKVADYIADTFEKSEGVPVEKVRLTERPENLSSNSEILDWDIYQYYKFLAERGDVQIQVSLGQLHLIGRKGLDQDYYKALHYFLKAAKAGSANAMAFIGKMYLEGNAAVPQNNATAFKYFSMAASKGNAIGLHGLGLLYFHGKGVPLNYAXALKYFQKAAEKGWPDAQFQLGFMYYSGSGIWKDYKLAFKYFYLASQSGQPLAIYYLAKMYATGTGVVRSCRTAVELYKGVCELGHWAEKFLTAYFAYKDGDIDSSLVQYALLAEMGYEVAQSNSAFILESKKANILEKEKMYPMALLLWNRAAIQGNAFARVKIGDYHYYGYGTKKDYQTAATHYSIAANKYHNAQAMFNLAYMYEHGLGITKDIHLARRLYDMAAQTSPDAHIPVLFAVMKLETTHLLRDILFFNQFTTRWNWLKLDNTIGPHWDLFVIGLIVPGLILLLRNHHG

SEQ ID NO: 11 - DNA, 2067 bp, Homo sapiens
  CDS (1)...(2067)
atgaagcccttgtctctgttaatagagatattgataattcttggggtcacaattaaaactatcaaagcagaggaacataataaaagacaaaaggaaagaaatgtcaccacacaggtatcagtgaacgaaatcaaacaatatttatcacacatattggaacaaagaacatctagtaatgtaatcaataaaagagaaaatctcctggagaaaaagaagaatcaacgtaaaataagaataaaaggaattcaaaataaagatatcttgaagagaaataagaatcatttacaaaagcaagcagagaaaaattttacagatgaaggagaccagctatttaagatgggcatcaaggttctccagcagtctaaaagccaaaaacaaaaagaagaagcctacctactttttgccaaagcagctgacatgggaaacttgaaagctatggagaaaatggctgacgctttgctatttggaaattttggcgtgcaaaatataacagcagctatccaattatatgagtccttggctaaagaaggatcatgtaaagcccaaaacgcattaggatttttgtcttcttatggaataggaatggaatatgatcaagctaaggcactgatatattacacctttggaagtgctggaggaaacatgatgtcccagatgattttggggtacagatatttgtcgggaatcaatgttctacagaattgtgaagttgccctaagttattacaagaaagtggcagattatattgctgacacatttgaaaaaagtgaaggtgttccagtggaaaaagtgagactaacggaaagacctgaaaatctgagttctaacagtgagattttggattgggacatataccaatactataaatttttggcagaaagaggagatgttcagatacaagtctctcttggacaattacatctaattggcaggaaaggtctagatcaggattactacaaagcattacactacttcttaaaggcagcaaaggccgggagtgcaaatgccatggcatttataggaaagatgtatttagaggggaatgctgccgtgccgcaaaataacgctactgccttcaagtacttttccatggcagccagtaagggcaatgcaatcggccttcatgggcttggtcttctttactttcatggaaaaggagttcccctgaattatgccraagcacttaaatactttcagaaagctgcggaaaaagggtggcccgacgcacagttccagttaggcttcatgtactactctggctctggaatatggaaggattataaacttgccttcaaatatttttacctggcatctcagagtgggcagcccctcgccatttattatctggccaagatgtatgcaacaggaacaggagtagtaagatcatgcagaactgctgtggagctttataaaggtgtctgtgaactaggccactgggctgagaaattcctgacagcttactttgcctataaggatggtgatatagattcttctcttgttcagtatgcactgcttgcagaaatggggtatgaagtagctcaaagcaattcagcattcattttggaatctaaaaaggctaacattcttgaaaaagagaagatgtatccaatggcgcttctcctatggaatcgagctgccattcaaggcaatgcatttgctagagtaaaaattggagattaccattactatggctatgggactaagaaagactatcaaacagcagccacacactacagcattgcagccaacaaataccacaacgcgcaagccatgttcaatctggcttatatgtatgaacacggcttaggcatcacaaaggacattcacttggccagaagattgtacgacatggctgctcaaacgagtccagatgcccacatacctgtgctctttgccgtcatgaaactggaaactacgcatttgctccgggatatcctgttttttaatttcacaacgagatggaactggctgaaactggacaacaccattggaccacactgggacttatttgtgattggcctcattgttcctgggctgattttgttgcttagaaatcaccatgggtag

SEQ ID NO: 12 - protein, 688 aa, Homo sapiens
  VARIANT (1)...(688): Xaa = Any Amino Acid
MKPLSLLIEILIILGVTIKTIKAEEHNKRQKERNVTTQVSVNEIKQYLSHILEQRTSSNVINKRENLLEKKKNQRKIRIKGIQNKDILKRNKNHLQKQAEKNFTDEGDQLFKMGIKVLQQSKSQKQKEEAYLLFAKAADMGNLKAMEKMADALLFGNFGVQNITAAIQLYESLAKEGSCKAQNALGFLSSYGIGMEYDQAKALIYYTFGSAGGNMMSQMILGYRYLSGINVLQNCEVALSYYKKVADYIADTFEKSEGVPVEKVRLTERPENLSSNSEILDWDIYQYYKFLAERGDVQIQVSLGQLHLIGRKGLDQDYYKALHYFLKAAKAGSANAMAFIGKMYLEGNAAVPQNNATAFKYFSMAASKGNAIGLHGLGLLYFHGKGVPLNYAXALKYFQKAAEKGWPDAQFQLGFMYYSGSGIWKDYKLAFKYFYLASQSGQPLAIYYLAKMYATGTGVVRSCRTAVELYKGVCELGHWAEKFLTAYFAYKDGDIDSSLVQYALLAEMGYEVAQSNSAFILESKKANILEKEKMYPMALLLWNRAAIQGNAFARVKIGDYHYYGYGTKKDYQTAATHYSIAANKYHNAQAMFNLAYMYEHGLGITKDIHLARRLYDMAAQTSPDAHIPVLFAVMKLETTHLLRDILFFNFTTRWNWLKLDNTIGPHWDLFVIGLIVPGLILLLRNHHG

SEQ ID NO: 13 - DNA, 1773 bp, Homo sapiens
  CDS (1)...(1773)
atgaagcccttgtctctgttaatagagatattgataattcttggggtcacaattaaaactatcaaagcagaggaacataataaaagacaaaaggaaagaaatgtcaccacacaggtatcagtgaacgaaatcaaacaatatttatcacacatattggaacaaagaacatctagtaatgtaatcaataaaagagaaaatctcctggagaaaaagaagaatcaacgtaaaataagaataaaaggaattcaaaataaagatatcttgaagagaaataagaatcatttacaaaagcaagcagagaaaaattttacagatgaaggagaccagctatttaagatgggcatcaaggttctccagcagtctaaaagccaaaaacaaaaagaagaagcctacctactttttgccaaagcagctgacatgggaaacttgaaagctatggagaaaatggctgacgctttgctatttggaaattttggcgtgcaaaatataacagcagctatccaattatatgagtccttggctaaagaaggatcatgtaaagcccaaaacgcattaggatttttgtcttcttatggaataggaatggaatatgatcaagctaaggcactgatatattacacctttggaagtgctggaggaaacatgatgtcccagatgattttggggtacagatatttgtcgggaatcaatgttctacagaattgtgaagttgccctaagttattacaagaaagtggcagattatattgctgacacatttgaaaaaagtgaaggtgttccagtggaaaaagtgagactaacggaaagacctgaaaatctgagttctaacagtgagattttggattgggacatataccaatactataaatttttggcagaaagaggagatgttcagatacaagtctctcttggacaattacatctaattggcaggaaaggtctagatcaggattactacaaagcattacactacttcttaaaggcagcaaaggccgggagtgcaaatgccatggcatttataggaaagatgtatttagaggggaatgctgccgtgccgcaaaataacgctactgccttcaagtacttttccatggcagccagtaagggcaatgcaatcggccttcatgggcttggtcttctttactttcatggaaaaggagttcccctgaattatgccraagcacttaaatactttcagaaagctgcggaaaaagggtggcccgacgcacagttccagttaggcttcatgtactactctggctctggaatatggaaggattataaacttgccttcaaatatttttacctggcatctcagagtgggcagcccctcgccatttattatctggccaagatgtatgcaacaggaacaggagtagtaagatcatgcagaactgctgtggagctttataaaggtgtctgtgaactaggccactgggctgagaaattcctgacagcttactttgcctataaggatggtgatatagattcttctcttgttcagtatgcactgcttgcagaaatggggtatgaagtagctcaaagcaattcagcattcattttggaatctaaaaaggctaacattcttgaaaaagagaagatgtatccaatggcgcttctcctatggaatcgagctgccattcaaggacattcacttggccagaagattgtacgacatggctgctcaaacgagtccagatgcccacatacctgtgctctttgccgtcatgaaactggaaactacgcatttgctccgggatatcctgttttttaa

SEQ ID NO: 14 - protein, 590 aa, Homo sapiens
  VARIANT (1)...(590): Xaa = Any Amino Acid
MKPLSLLIEILIILGVTIKTIKAEEHNKRQKERNVTTQVSVNEIKQYLSHILEQRTSSNVINKRENLLEKKKNQRKIRIKGIQNKDILKRNKNHLQKQAEKNFTDEGDQLFKMGIKVLQQSKSQKQKEEAYLLFAKAADMGNLKAMEKMADALLFGNFGVQNITAAIQLYESLAKEGSCKAQNALGFLSSYGIGMEYDQAKALIYYTFGSAGGNMMSQMILGYRYLSGINVLQNCEVALSYYKKVADYIADTFEKSEGVPVEKVRLTERPENLSSNSEILDWDIYQYYKFLAERGDVQIQVSLGQLHLIGRKGLDQDYYKALHYFLKAAKAGSANAMAFIGKMYLEGNAAVPQNNATAFKYFSMAASKGNAIGLHGLGLLYFHGKGVPLNYAXALKYFQKAAEKGWPDAQFQLGFMYYSGSGIWKDYKLAFKYFYLASQSGQPLAIYYLAKMYATGTGVVRSCRTAVELYKGVCELGHWAEKFLTAYFAYKDGDIDSSLVQYALLAEMGYEVAQSNSAFILESKKANILEKEKMYPMALLLWNRAAIQGHSLGQKIVRHGCSNESRCPHTCALCRHETGNYAFAPGYPVF

SEQ ID NO: 15 - DNA, 1257 bp, Homo sapiens
  CDS (1)...(1257)
atgaagcccttgtctctgttaatagagatattgataattcttggggtcacaattaaaactatcaaagcagaggaacataataaaagacaaaaggaaagaaatgtcaccacacaggtatcagtgaacgaaatcaaacaatatttatcacacatattggaacaaagaacatctagtaatgtaatcaataaaagagaaaatctcctggagaaaaagaagaatcaacgtaaaataagaataaaaggaattcaaaataaagatatcttgaagagaaataagaatcatttacaaaagcaagcagagaaaaattttacagatgaaggagaccagctatttaagatgggcatcaaggttctccagcagtctaaaagccaaaaacaaaaagaagaagcctacctactttttgccaaagcagctgacatgggaaacttgaaagctatggagaaaatggctgacgctttgctatttggaaattttggcgtgcaaaatataacagcagctatccaattatatgagtccttggctaaagaaggatcatgtaaagcccaaaacgcattaggatttttgtcttcttatggaataggaatggaatatgatcaagctaaggcactgatatattacacctttggaagtgctggaggaaacatgatgtcccagatgattttggggtacagatatttgtcgggaatcaatgttctacagaattgtgaagttgccctaagttattacaagaaagtggcagattatattgctgacacatttgaaaaaagtgaaggtgttccagtggaaaaagtgagactaacggaaagacctgaaaatctgagttctaacagtgagattttggattgggacatataccaatactataaatttttggcagaaagaggagatgttcagatacaagtctctcttggacaattacatctaattggcaggaaaggtctagatcaggattactacaaagcattacactacttcttaaaggcagcaaaggccgggagtgcaaatgccatggcatttataggaaagatgtatttagaggggaatgctgccgtgccgcaaaataacgctactgccttcaagtacttttccatggcagccagtaagggcaatgcaatcggccttcatgggcttggtcttctttactttcatggaaaaggagttcccctgaattatgccraagcacttaaatactttcagaaagctgcggaaaaagggtggcccgacgcacagttccagttaggcttcatgtactactaa

SEQ ID NO: 16 - protein, 418 aa, Homo sapiens
  VARIANT (1)...(418): Xaa = Any Amino Acid
MKPLSLLIEILIILGVTIKTIKAEEHNKRQKERNVTTQVSVNEIKQYLSHILEQRTSSNVINKRENLLEKKKNQRKIRIKGIQNKDILKRNKNHLQKQAEKNFTDEGDQLFKMGIKVLQQSKSQKQKEEAYLLFAKAADMGNLKAMEKMADALLFGNFGVQNITAAIQLYESLAKEGSCKAQNALGFLSSYGIGMEYDQAKALIYYTFGSAGGNMMSQMILGYRYLSGINVLQNCEVALSYYKKVADYIADTFEKSEGVPVEKVRLTERPENLSSNSEILDWDIYQYYKFLAERGDVQIQVSLGQLHLIGRKGLDQDYYKALHYFLKAAKAGSANAMAFIGKMYLEGNAAVPQNNATAFKYFSMAASKGNAIGLHGLGLLYFHGKGVPLNYAXALKYFQKAAEKGWPDAQFQLGFMYY

SEQ ID NO: 17 - DNA, 1500 bp, Homo sapiens
  CDS (1)...(1500)
atgaagcccttgtctctgttaatagagatattgataattcttggggtcacaattaaaactatcaaagcagaggaacataataaaagacaaaaggaaagaaatgtcaccacacaggtatcagtgaacgaaatcaaacaatatttatcacacatattggaacaaagaacatctagtaatgtaatcaataaaagagaaaatctcctggagaaaaagaagaatcaacgtaaaataagaataaaaggaattcaaaataaagatatcttgaagagaaataagaatcatttacaaaagcaagcagagaaaaattttacagatgaaggagaccagctatttaagatgggcatcaaggttctccagcagtctaaaagccaaaaacaaaaagaagaagcctacctactttttgccaaagcagctgacatgggaaacttgaaagctatggagaaaatggctgacgctttgctatttggaaattttggcgtgcaaaatataacagcagctatccaattatatgagtccttggctaaagaaggatcatgtaaagcccaaaacgcattaggatttttgtcttcttatggaataggaatggaatatgatcaagctaaggcactgatatattacacctttggaagtgctggaggaaacatgatgtcccagatgattttggggtacagatatttgtcgggaatcaatgttctacagaattgtgaagttgccctaagttattacaagaaagtggcagattatattgctgacacatttgaaaaaagtgaaggtgttccagtggaaaaagtgagactaacggaaagacctgaaaatctgagttctaacagtgagattttggattgggacatataccaatactataaatttttggcagaaagaggagatgttcagatacaagtctctcttggacaattacatctaattggcaggaaaggtctagatcaggattactacaaagcattacactacttcttaaaggcagcaaaggccgggagtgcaaatgccatggcatttataggaaagatgtatttagaggggaatgctgccgtgccgcaaaataacgctactgccttcaagtacttttccatggcagccagtaagggcaatgcaatcggccttcatgggcttggtcttctttactttcatggaaaaggagttcccctgaattatgccraagcacttaaatactttcagaaagctgcggaaaaagggtggcccgacgcacagttccagttaggcttcatgtactactctggctctggaatatggaaggattataaacttgccttcaaatatttttacctggcatctcagagtgggcagcccctcgccatttattatctggccaagatgtatgcaacaggaacaggagtagtaagatcatgcagaactgctgtggagaaaaggctaacattcttgaaaaagagaagatgtatccaatggcgcttctcctatggaatcgagctgccattcaaggcaatgcatttgctagagtaa

SEQ ID NO: 18 - protein, 499 aa, Homo sapiens
  VARIANT (1)...(499): Xaa = Any Amino Acid
MKPLSLLIEILIILGVTIKTIKAEEHNKRQKERNVTTQVSVNEIKQYLSHILEQRTSSNVINKRENLLEKKKNQRKIRIKGIQNKDILKRNKNHLQKQAEKNFTDEGDQLFKMGIKVLQQSKSQKQKEEAYLLFAKAADMGNLKAMEKMADALLFGNFGVQNITAAIQLYESLAKEGSCKAQNALGFLSSYGIGMEYDQAKALIYYTFGSAGGNMMSQMILGYRYLSGINVLQNCEVALSYYKKVADYIADTFEKSEGVPVEKVRLTERPENLSSNSEILDWDIYQYYKFLAERGDVQIQVSLGQLHLIGRKGLDQDYYKALHYFLKAAKAGSANAMAFIGKMYLEGNAAVPQNNATAFKYFSMAASKGNAIGLHGLGLLYFHGKGVPLNYAXALKYFQKAAEKGWPDAQFQLGFMYYSGSGIWKDYKLAFKYFYLASQSGQPLAIYYLAKMYATGTGVVRSCRTAVEKRLTFLKKRRCIQWRFSYGIELPFKAMHLLE

SEQ ID NO: 19 - DNA, 1731 bp, Homo sapiens
  CDS (1)...(1731)
atgaagcccttgtctctgttaatagagatattgataattcttggggtcacaattaaaactatcaaagcagaggaacataataaaagacaaaaggaaagaaatgtcaccacacaggtatcagtgaacgaaatcaaacaatatttatcacacatattggaacaaagaacatctagtaatgtaatcaataaaagagaaaatctcctggagaaaaagaagaatcaacgtaaaataagaataaaaggaattcaaaataaagatatcttgaagagaaataagaatcatttacaaaagcaagcagagaaaaattttacagatgaaggagaccagctatttaagatgggcatcaaggttctccagcagtctaaaagccaaaaacaaaaagaagaagcctacctactttttgccaaagcagctgacatgggaaacttgaaagctatggagaaaatggctgacgctttgctatttggaaattttggcgtgcaaaatataacagcagctatccaattatatgagtccttggctaaagaaggatcatgtaaagcccaaaacgcattaggatttttgtcttcttatggaataggaatggaatatgatcaagctaaggcactgatatattacacctttggaagtgctggaggaaacatgatgtcccagatgattttggggtacagatatttgtcgggaatcaatgttctacagaattgtgaagttgccctaagttattacaagaaagtggcagattatattgctgacacatttgaaaaaagtgaaggtgttccagtggaaaaagtgagactaacggaaagacctgaaaatctgagttctaacagtgagattttggattgggacatataccaatactataaatttttggcagaaagaggagatgttcagatacaagtctctcttggacaattacatctaattggcaggaaaggtctagatcaggattactacaaagcattacactacttcttaaaggcagcaaaggccgggagtgcaaatgccatggcatttataggaaagatgtatttagaggggaatgctgccgtgccgcaaaataacgctactgccttcaagtacttttccatggcagccagtaagggcaatgcaatcggccttcatgggcttggtcttctttactttcatggaaaaggagttcccctgaattatgccraagcacttaaatactttcagaaagctgcggaaaaagggtggcccgacgcacagttccagttaggcttcatgtactactctggctctggaatatggaaggattataaacttgccttcaaatatttttacctggcatctcagagtgggcagcccctcgccatttattatctggccaagatgtatgcaacaggaacaggagtagtaagatcatgcagaactgctgtggagaaaaggctaacattcttgaaaaagagaagatgtatccaatggcgcttctcctatggaatcgagctgccattcaaggacattcacttggccagaagattgtacgacatggctgctcaaacgagtccagatgcccacatacctgtgctctttgccgtcatgaaactggaaactacgcatttgctccgggatatcctgttttttaatcagttcacaacgagatggaactggctgaaactggacaacaccattggaccacactgggacttatttgtgattggcctcattgttcctgggctgattttgttgcttagaaatcaccatgggtag

SEQ ID NO: 20 - protein, 576 aa, Homo sapiens
  VARIANT (1)...(576): Xaa = Any Amino Acid
MKPLSLLIEILIILGVTIKTIKAEEHNKRQKERNVTTQVSVNEIKQYLSHILEQRTSSNVINKRENLLEKKKNQRKIRIKGIQNKDILKRNKNHLQKQAEKNFTDEGDQLFKMGIKVLQQSKSQKQKEEAYLLFAKAADMGNLKAMEKMADALLFGNFGVQNITAAIQLYESLAKEGSCKAQNALGFLSSYGIGMEYDQAKALIYYTFGSAGGNMMSQMILGYRYLSGINVLQNCEVALSYYKKVADYIADTFEKSEGVPVEKVRLTERPENLSSNSEILDWDIYQYYKFLAERGDVQIQVSLGQLHLIGRKGLDQDYYKALHYFLKAAKAGSANAMAFIGKMYLEGNAAVPQNNATAFKYFSMAASKGNAIGLHGLGLLYFHGKGVPLNYAXALKYFQKAAEKGWPDAQFQLGFMYYSGSGIWKDYKLAFKYFYLASQSGQPLAIYYLAKMYATGTGVVRSCRTAVEKRLTFLKKRRCIQWRFSYGIELPFKDIHLARRLYDMAAQTSPDAHIPVLFAVMKLETTHLLRDILFFNQFTTRWNWLKLDNTIGPHWDLFVIGLIVPGLILLLRNHHG

SEQ ID NO: 21 - DNA, 1728 bp, Homo sapiens
  CDS (1)...(1728)
atgaagcccttgtctctgttaatagagatattgataattcttggggtcacaattaaaactatcaaagcagaggaacataataaaagacaaaaggaaagaaatgtcaccacacaggtatcagtgaacgaaatcaaacaatatttatcacacatattggaacaaagaacatctagtaatgtaatcaataaaagagaaaatctcctggagaaaaagaagaatcaacgtaaaataagaataaaaggaattcaaaataaagatatcttgaagagaaataagaatcatttacaaaagcaagcagagaaaaattttacagatgaaggagaccagctatttaagatgggcatcaaggttctccagcagtctaaaagccaaaaacaaaaagaagaagcctacctactttttgccaaagcagctgacatgggaaacttgaaagctatggagaaaatggctgacgctttgctatttggaaattttggcgtgcaaaatataacagcagctatccaattatatgagtccttggctaaagaaggatcatgtaaagcccaaaacgcattaggatttttgtcttcttatggaataggaatggaatatgatcaagctaaggcactgatatattacacctttggaagtgctggaggaaacatgatgtcccagatgattttggggtacagatatttgtcgggaatcaatgttctacagaattgtgaagttgccctaagttattacaagaaagtggcagattatattgctgacacatttgaaaaaagtgaaggtgttccagtggaaaaagtgagactaacggaaagacctgaaaatctgagttctaacagtgagattttggattgggacatataccaatactataaatttttggcagaaagaggagatgttcagatacaagtctctcttggacaattacatctaattggcaggaaaggtctagatcaggattactacaaagcattacactacttcttaaaggcagcaaaggccgggagtgcaaatgccatggcatttataggaaagatgtatttagaggggaatgctgccgtgccgcaaaataacgctactgccttcaagtacttttccatggcagccagtaagggcaatgcaatcggccttcatgggcttggtcttctttactttcatggaaaaggagttcccctgaattatgccraagcacttaaatactttcagaaagctgcggaaaaagggtggcccgacgcacagttccagttaggcttcatgtactactctggctctggaatatggaaggattataaacttgccttcaaatatttttacctggcatctcagagtgggcagcccctcgccatttattatctggccaagatgtatgcaacaggaacaggagtagtaagatcatgcagaactgctgtggagaaaaggctaacattcttgaaaaagagaagatgtatccaatggcgcttctcctatggaatcgagctgccattcaaggacattcacttggccagaagattgtacgacatggctgctcaaacgagtccagatgcccacatacctgtgctctttgccgtcatgaaactggaaactacgcatttgctccgggatatcctgttttttaatttcacaacgagatggaactggctgaaactggacaacaccattggaccacactgggacttatttgtgattggcctcattgttcctgggctgattttgttgcttagaaatcaccatgggtag

SEQ ID NO: 22 - protein, 575 aa, Homo sapiens
  VARIANT (1)...(575): Xaa = Any Amino Acid
MKPLSLLIEILIILGVTIKTIKAEEHNKRQKERNVTTQVSVNEIKQYLSHILEQRTSSNVINKRENLLEKKKNQRKIRIKGIQNKDILKRNKNHLQKQAEKNFTDEGDQLFKMGIKVLQQSKSQKQKEEAYLLFAKAADMGNLKAMEKMADALLFGNFGVQNITAAIQLYESLAKEGSCKAQNALGFLSSYGIGMEYDQAKALIYYTFGSAGGNMMSQMILGYRYLSGINVLQNCEVALSYYKKVADYIADTFEKSEGVPVEKVRLTERPENLSSNSEILDWDIYQYYKFLAERGDVQIQVSLGQLHLIGRKGLDQDYYKALHYFLKAAKAGSANAMAFIGKMYLEGNAAVPQNNATAFKYFSMAASKGNAIGLHGLGLLYFHGKGVPLNYAXALKYFQKAAEKGWPDAQFQLGFMYYSGSGIWKDYKLAFKYFYLASQSGQPLAIYYLAKMYATGTGVVRSCRTAVEKRLTFLKKRRCIQWRFSYGIELPFKDIHLARRLYDMAAQTSPDAHIPVLFAVMKLETTHLLRDILFFNFTTRWNWLKLDNTIGPHWDLFVIGLIVPGLILLLRNHHG

SEQ ID NO: 23 - DNA, 603 bp, Homo sapiens
  CDS (1)...(603)
atggattcaagcaccgcacacagtccggtgtttctggtatttcctccagaaatcactgcttcagaatatgagtccacagaactttcagccacgaccttttcaactcaaagccccttgcaaaaattatttgctagaaaaatgaaaatcttagggactatccagatcctgtttggaattatgaccttttcttttggagttatcttccttttcaccttgttaaaaccatatccaaggtttccctttatatttctttcaggatatccattctggggctctgttttgttcattaattctggagccttcctaattgcagtgaaaagaaaaaccacagaaactctgataatattgagccgaataatgaatcttcttagtgccctgagagcaatagctggaatcattctcctcacatttggtttcatcctagatcaaaactacatttgtggttattctcaccaaaatagtcagtgtaaggctgttactgtcctgttcttgggaattttgattacattgatgactttcagcattattgaattattcatttctctgcctttctcaattttggggtgccactcagaggattgtgattgtgaacaatgttgttga

SEQ ID NO: 24 - protein, 200 aa, Homo sapiens
MDSSTAHSPVFLVFPPEITASEYESTELSATTFSTQSPLQKLFARKMKILGTIQILFGIMTFSFGVIFLFTLLKPYPRFPFIFLSGYPFWGSVLFINSGAFLIAVKRKTTETLIILSRIMNLLSALRAIAGIILLTFGFILDQNYICGYSHQNSQCKAVTVLFLGILITLMTFSIIELFISLPFSILGCHSEDCDCEQCC

SEQ ID NO: 25 - DNA, 246 bp, Homo sapiens
  CDS (1)...(246)
atgaatcttcttagtgccctgagagcaatagctggaatcattctcctcacatttggtttcatcctagatcaaaactacatttgtggttattctcaccaaaatagtcagtgtaaggctgttactgtcctgttcttgggaattttgattacattgatgactttcagcattattgaattattcatttctctgcctttctcaattttggggtgccactcagaggattgtgattgtgaacaatgttgttga

SEQ ID NO: 26 - protein, 81 aa, Homo sapiens
MNLLSALRAIAGIILLTFGFILDQNYICGYSHQNSQCKAVTVLFLGILITLMTFSIIELFISLPFSILGCHSEDCDCEQCC

SEQ ID NO: 27 - DNA, 417 bp, Homo sapiens
  CDS (1)...(417)
atggattcaagcaccgcacacagtccggtgtttctggtatttcctccagaaatcactgcttcagaatatgagtccacagaactttcagccacgaccttttcaactcaaagccccttgcaaaaattatttgctagaaaaatgaaaatcttagggactatccagatcctgtttggaattatgaccttttcttttggagttatcttccttttcaccttgttaaaaccatatccaaggtttccctttatatttctttcaggatatccattctggggctctgttttgttcattaattctggagccttcctaattgcagtgaaaagaaaaaccacagaaactctgatcaaaactacatttgtggttattctcaccaaaatagtcagtgtaaggctgttactgtcctgttcttgggaattttga

SEQ ID NO: 28 - protein, 138 aa, Homo sapiens
MDSSTAHSPVFLVFPPEITASEYESTELSATTFSTQSPLQKLFARKMKILGTIQILFGIMTFSFGVIFLFTLLKPYPRFPFIFLSGYPFWGSVLFINSGAFLIAVKRKTTETLIKTTFVVILTKIVSVRLLLSCSWEF

SEQ ID NO: 29 - DNA, 450 bp, Homo sapiens
  CDS (1)...(450)
atggattcaagcaccgcacacagtccggtgtttctggtatttcctccagaaatcactgcttcagaatatgagtccacagaactttcagccacgaccttttcaactcaaagccccttgcaaaaattatttgctagaaaaatgaaaatcttagggactatccagatcctgtttggaattatgaccttttcttttggagttatcttccttttcaccttgttaaaaccatatccaaggtttccctttatatttctttcaggatatccattctggggctctgttttgttcattaattctggagccttcctaattgcagtgaaaagaaaaaccacagaaactctgggaattttgattacattgatgactttcagcattattgaattattcatttctctgcctttctcaattttggggtgccactcagaggattgtgattgtgaacaatgttgttga

SEQ ID NO: 30 - protein, 149 aa, Homo sapiens
MDSSTAHSPVFLVFPPEITASEYESTELSATTFSTQSPLQKLFARKMKILGTIQILFGIMTFSFGVIFLFTLLKPYPRFPFIFLSGYPFWGSVLFINSGAFLIAVKRKTTETLGILITLMTFSIIELFISLPFSILGCHSEDCDCEQCC

SEQ ID NO: 31 - DNA, 676 bp, Homo sapiens
tcatctcctttcaaattatcaccgacaccatcatggattcaagcaccgcacacagtccggtgtttctggtatttcctccagaaatcactgcttcagaatatgagtccacagaactttcagccacgaccttttcaactcaaagccccttgcaaaaattatttgctagaaaaatgaaaatcttagggactatccagatcctgtttggaattatgaccttttcttttggagttatcttccttttcaccttgttaaaaccatatccaaggtttccctttatatttctttcaggatatccattctggggctctgttttgttcattaattctggagccttcctaattgcagtgaaaagaaaaaccacagaaactctgataatattgagccgaataatgaatcttcttagtgccctgagagcaatagctggaatcattctcctcacatttggtttcatcctagatcaaaactacatttgtggttattctcaccaaaatagtcagtgtaaggctgttactgtcctgttcttgggaattttgattacattgatgactttcagcattattgaattattcatttctctgcctttctcaattttggggtgccactcagaggattgtgattgtgaacaatgttgttgactagcactgtgagaataaagatgtgttaaaataaaaaaaaa

SEQ ID NO: 32 - DNA, 747 bp, Homo sapiens
  CDS (1)...(747)
atgttaagaaataacaaaacaataattattaagtactttcttaatctcattaatggagctttcttggttcttggacttttattcatgggatttggtgcatggctcttattagatagaaataattttttaacagcttttgatgaaaataatcacttcatagtacctatttctcaaattttgattggaatgggatcttctactgttcttttttgtctattgggttatataggaattcacaacgaaatcagatggctcctaattgtgtatgcagtattgataacatggacctttgctgttcaggttgtactttcagcattcatcatcacaaagaaagaggaggttcagcaactatggcatgacaaaattgattttgtcatttctgagtatggatctaaagataagcctgaagatataaccaagtggactattctgaatgccttacagaaaacattacagtgttgtggccaacataattacacagactggataaagaataagaacaaagaaaattcaggacaggtgccatgttcttgcacaaagtcaactttaagaaaatggttttgtgatgagccactgaatgcaacttaccttgagggttgtgaaaataaaatcagtgcatggtataatgttaatgtgttaaccttaatcggaattaactttggacttttaacttcagaggttttccaagtctcattaacagtttgtttcttcaaaaacatcaagaatataatccatgcagaaatgtga

SEQ ID NO: 33 - protein, 248 aa, Homo sapiens
MLRNNKTIIIKYFLNLINGAFLVLGLLFMGFGAWLLLDRNNFLTAFDENNHFIVPISQILIGMGSSTVLFCLLGYIGIHNEIRWLLIVYAVLITWTFAVQVVLSAFIITKKEEVQQLWHDKIDFVISEYGSKDKPEDITKWTILNALQKTLQCCGQHNYTDWIKNKNKENSGQVPCSCTKSTLRKWFCDEPLNATYLEGCENKISAWYNVNVLTLIGINFGLLTSEVFQVSLTVCFFKNIKNIIHAEM

SEQ ID NO: 34 - DNA, 636 bp, Homo sapiens
  CDS (1)...(636)
atgttaagaaataacaaaacaataattattaagtactttcttaatctcattaatggagctttcttggttcttggacttttattcatgggatttggtgcatggctcttattagatagaaataattttttaacagcttttgatgaaaataatcacttcatagtacctatttctcaaattttgattggaatgggatcttctactgttcttttttgtctattgggttatataggaattcacaacgaaatcagatggctcctaattgtgtatgcagtattgataacatggacctttgctgttcaggttgtactttcagcattcatcatcacaaagaaagaggagttacagtgttgtggccaacataattacacagactggataaagaataagaacaaagaaaattcaggacaggtgccatgttcttgcacaaagtcaactttaagaaaatggttttgtgatgagccactgaatgcaacttaccttgagggttgtgaaaataaaatcagtgcatggtataatgttaatgtgttaaccttaatcggaattaactttggacttttaacttcagaggttttccaagtctcattaacagtttgtttcttcaaaaacatcaagaatataatccatgcagaaatgtga

SEQ ID NO: 35 - protein, 211 aa, Homo sapiens
MLRNNKTIIIKYFLNLINGAFLVLGLLFMGFGAWLLLDRNNFLTAFDENNHFIVPISQILIGMGSSTVLFCLLGYIGIHNEIRWLLIVYAVLITWTFAVQVVLSAFIITKKEELQCCGQHNYTDWIKNKNKENSGQVPCSCTKSTLRKWFCDEPLNATYLEGCENKISAWYNVNVLTLIGINFGLLTSEVFQVSLTVCFFKNIKNIIHAEM

SEQ ID NO: 36 - DNA, 3924 bp, Homo sapiens
  CDS (1)...(3924)
atggattctttaccacggctgaccagcgttttgactttgctgttctctggcttgtggcatttaggattaacagcgacaaactacaactgtgatgatccactagcatccctgctctctccaatggctttttccagttcctcagacctcactggcactcacagcccagctcaactcaactggagagttggaactggcggttggtccccagcagattccaatgctcaacagtggctccagatggacctgggaaacagagtagagattacagcagtggccacgcagggaagatacggaagctctgactgggtgacgagttacagcctgatgttcagtgacacaggacgcaactggaaacagtacaaacaagaagacagcatctggacctttgcaggaaacatgaatgctgacagcgtggtgcaccacaagctattgcactcagtgagagcccgatttgttcgctttgtgcccctggaatggaatcccagtgggaagattggcatgagagtcgaggtctacggatgttcctataaatcagacgttgctgactttgatggccgaagctcacttctgtacaggttcaatcagaagttgatgagtactctcaaagatgtgatctccctgaagttcaagagcatgcaaggagatggggtcctgttccatggagaaggtcagcgtggagaccacatcaccttggaactccagaaggggaggctcgccctacacctcaatttgggtgacagcaaagcgcggctcagcagcagcttgccctctgccaccctgggcagcctcctggatgaccagcactggcactyggtcctcattgagcgggtgggcaagcaggtgaacttcacggtggacaagcacacacagcacttccgcaccaagggcgagacggatgccttagacattgactatgagcttagttttggaggaattccagtaccaggaaaacctgggacctttttaaagaaaaacttccatggatgcatcgaaaacctttactacaatggagtaaacataattracctggctaagagacgaaagcatcagatctatactgtgggcaatgtcactttttcctgctccgaaccacagattgtgcccatcacatttgtyaactccagcggcagctatttgctgctgcccggcaccccccaaattgatgggctctcagtgagtttccagtttcgaacatggaacaaggatggtctgcttctgtccacagagctgtctgagggctcgggaaccctgctgctgagcctggagggtggaatcctgagactcgtgattcagaaaatgacagaacgcgtagctgaaatcctcacaggcagcaacttgaatgatggcctgtggcactcggttagcatcaacgccaggaggaaccgcatcacgctcactctggatgatgaagcagcacccccggctccagacagcacttgggtgcagatttattctggaaatagctactattttggagggtgccccgacaatctcaccgattcccaatgtttaaatcccattaaggctttccaaggctgcatgaggctcatctttattgataaccagcccaaggacctcatttcagttcagcaaggttccctggggaattttagtgatttacacattgatctgtgtagcatcaaagacaggtgtttgccaaactactgtgaacatggaggaagctgctcccagtcctggactaccttctattgtaactgcagtgacacaagttacactggtgccacctgccacaactccatctacgagcaatcctgcgaggtgtacaggcaccaggggaatacagccggcttcttctacatcgactcagatggcagcggcccactgggacctctccaggtgtactgcaatatcactgaggacaagatctggacatcagtgcagcacaacaatacagagctgacccgagtgcggggcgctaaccctgagaagccctatgccatggccttggactacgggggcagcatggaacagctggaggccgtgatcgacggctctgagcactgtgagcaggaggtggcctaccactgcaggaggtcccgcctgctcaacacgccggatggaacaccatttacctggtggattgggcggtccaatgaaaggcacccttactggggaggttcccctcctggggtccagcagtgtgagtgtggcctagacgagagctgcctggacattcagcacttttgcaattgcgacgctgacaaggatgaatggacaaatgatactggctttctttccttcaaagaccacttgcctgtcactcagatagttatcactgataccgacagatcaaactcagaagccgcttggagaattggtcccttgcgttgctatggtgaccgacgcttctggaacgccgtctcattttatacagaagcctcttacctccactttcctaccttccatgcggaattcagtgccgatatttccttcttttttaaaaccacagcattatccggagttttcctagaaaatcttggcattaaagacttcattcgactcgaaataagctctccttcagagatcacctttgccatcgatgttgggaatggtcctgtggagcttgtagtccagtctccttctcttctgaatgacaaccaatggcactatgtccgggctgagaggaacctcaaggagacctccctgcaggtggacaaccttccaaggagcaccagggagacgtcggaggagggccattttcgactgcagctgaacagccagttgtttgtagggggaacgtcatccagacagaaaggcttcctaggatgcattcgctccttacacttgaatggacagaaaatggacctggaagagagggcaaaggtcacatctggagtcaggccaggctgccccggccactgcagcagctacggcagcatctgccacaacgggggcaagtgtgtggagaagcacaatggctacctgtgtgattgcaccaattcaccttatgaagggcccttttgcaaaaaagaggtttctgctgtttttgaggctggcacgtcggttacttacatgtttcaagaaccctatcctgtgaccaagaatataagcctctcatcctcagctatttacacagattcagctccatccaaggaaaacattgcacttagctttgtgacaacccaggcacccagtcttttgctctttatcaattcttcttctcaggacttcgtggttgttctgctctgcaagaatggaagcttacaggttcgctatcacctaaacaaggaagaaacccatgtattcaccattgatgcagataactttgctaacagaaggatgcaccacttgaagattaaccgagagggaagagagcttaccattcagatggaccagcaacttcgactcagttataacttctctccggaagtagagttcagggttataaggtcactcaccttgggcaaagtcacagagaatcttggtttggattctgaagttgctaaagcaaatgccatgggttttgctggatgcatgtcttccgtccagtacaaccacatagcaccactgaaggctgccctgcgccatgccactgtcgcgcctgtgactgtccatgggaccttgacggaatccagctgtggcttcatggtggactcagatgtgaatgcagtgaccacggtgcattcttcatcagatccttttgggaagacagatgagcgggaaccactcacaaatgctgttcgaagtgattcggcagtcatcggaggggtgatagcagtggtgatattcatcatcttctgtatcatcggcatcatgacccggttcctctaccagcacaagcagtcacatcgtacgagccagatgaaggagaaggaatatccagaaaatttggacagttccttcagaaatgaaattgacttgcaaaacacagtgagcgagtgtaaacgggaatatttcatctga

SEQ ID NO: 37 - protein, 1307 aa, Homo sapiens
  VARIANT (1)...(1307): Xaa = Any Amino Acid
MDSLPRLTSVLTLLFSGLWHLGLTATNYNCDDPLASLLSPMAFSSSSDLTGTHSPAQLNWRVGTGGWSPADSNAQQWLQMDLGNRVEITAVATQGRYGSSDWVTSYSLMFSDTGRNWKQYKQEDSIWTFAGNMNADSVVHHKLLHSVRARFVRFVPLEWNPSGKIGMRVEVYGCSYKSDVADFDGRSSLLYRFNQKLMSTLKDVISLKFKSMQGDGVLFHGEGQRGDHITLELQKGRLALHLNLGDSKARLSSSLPSATLGSLLDDQHWHXVLIERVGKQVNFTVDKHTQHFRTKGETDALDIDYELSFGGIPVPGKPGTFLKKNFHGCIENLYYNGVNIIXLAKRRKHQIYTVGNVTFSCSEPQIVPITFXNSSGSYLLLPGTPQIDGLSVSFQFRTWNKDGLLLSTELSEGSGTLLLSLEGGILRLVIQKMTERVAEILTGSNLNDGLWHSVSINARRNRITLTLDDEAAPPAPDSTWVQIYSGNSYYFGGCPDNLTDSQCLNPIKAFQGCMRLIFIDNQPKDLISVQQGSLGNFSDLHIDLCSIKDRCLPNYCEHGGSCSQSWTTFYCNCSDTSYTGATCHNSIYEQSCEVYRHQGNTAGFFYIDSDGSGPLGPLQVYCNITEDKIWTSVQHNNTELTRVRGANPEKPYAMALDYGGSMEQLEAVIDGSEHCEQEVAYHCRRSRLLNTPDGTPFTWWIGRSNERHPYWGGSPPGVQQCECGLDESCLDIQHFCNCDADKDEWTNDTGFLSFKDHLPVTQIVITDTDRSNSEAAWRIGPLRCYGDRRFWNAVSFYTEASYLHFPTFHAEFSADISFFFKTTALSGVFLENLGIKDFIRLEISSPSEITFAIDVGNGPVELVVQSPSLLNDNQWHYVRAERNLKETSLQVDNLPRSTRETSEEGHFRLQLNSQLFVGGTSSRQKGFLGCIRSLHLNGQKMDLEERAKVTSGVRPGCPGHCSSYGSICHNGGKCVEKHNGYLCDCTNSPYEGPFCKKEVSAVFEAGTSVTYMFQEPYPVTKNISLSSSAIYTDSAPSKENIALSFVTTQAPSLLLFINSSSQDFVVVLLCKNGSLQVRYHLNKEETHVFTIDADNFANRRMHHLKINREGRELTIQMDQQLRLSYNFSPEVEFRVIRSLTLGKVTENLGLDSEVAKANAMGFAGCMSSVQYNHIAPLKAALRHATVAPVTVHGTLTESSCGFMVDSDVNAVTTVHSSSDPFGKTDEREPLTNAVRSDSAVIGGVIAVVIFIIFCIIGIMTRFLYQHKQSHRTSQMKEKEYPENLDSSFRNEIDLQNTVSECKREYFI

SEQ ID NO: 38 - DNA, 3780 bp, Homo sapiens
  CDS (1)...(3780)
atggattctttaccacggctgaccagcgttttgactttgctgttctctggcttgtggcatttaggattaacagcgacaaactacaactgtgatgatccactagcatccctgctctctccaatggctttttccagttcctcagacctcactggcactcacagcccagctcaactcaactggagagttggaactggcggttggtccccagcagattccaatgctcaacagtggctccagatggacctgggaaacagagtagagattacagcagtggccacgcagggaagatacggaagctctgactgggtgacgagttacagcctgatgttcagtgacacaggacgcaactggaaacagtacaaacaagaagacagcatctggacctttgcaggaaacatgaatgctgacagcgtggtgcaccacaagctattgcactcagtgagagcccgatttgttcgctttgtgcccctggaatggaatcccagtgggaagattggcatgagagtcgaggtctacggatgttcctataaatcagacgttgctgactttgatggccgaagctcacttctgtacaggttcaatcagaagttgatgagtactctcaaagatgtgatctccctgaagttcaagagcatgcaaggagatggggtcctgttccatggagaaggtcagcgtggagaccacatcaccttggaactccagaaggggaggctcgccctacacctcaatttgggtgacagcaaagcgcggctcagcagcagcttgccctctgccaccctgggcagcctcctggatgaccagcactggcactyggtcctcattgagcgggtgggcaagcaggtgaacttcacggtggacaagcacacacagcacttccgcaccaagggcgagacggatgccttagacattgactatgagggcaatgtcactttttcctgctccgaaccacagattgtgcccatcacatttgtyaactccagcggcagctatttgctgctgcccggcaccccccaaattgatgggctctcagtgagtttccagtttcgaacatggaacaaggatggtctgcttctgtccacagagctgtctgagggctcgggaaccctgctgctgagcctggagggtggaatcctgagactcgtgattcagaaaatgacagaacgcgtagctgaaatcctcacaggcagcaacttgaatgatggcctgtggcactcggttagcatcaacgccaggaggaaccgcatcacgctcactctggatgatgaagcagcacccccggctccagacagcacttgggtgcagatttattctggaaatagctactattttggagggtgccccgacaatctcaccgattcccaatgtttaaatcccattaaggctttccaaggctgcatgaggctcatctttattgataaccagcccaaggacctcatttcagttcagcaaggttccctggggaattttagtgatttacacattgatctgtgtagcatcaaagacaggtgtttgccaaactactgtgaacatggaggaagctgctcccagtcctggactaccttctattgtaactgcagtgacacaagttacactggtgccacctgccacaactccatctacgagcaatcctgcgaggtgtacaggcaccaggggaatacagccggcttcttctacatcgactcagatggcagcggcccactgggacctctccaggtgtactgcaatatcactgaggacaagatctggacatcagtgcagcacaacaatacagagctgacccgagtgcggggcgctaaccctgagaagccctatgccatggccttggactacgggggcagcatggaacagctggaggccgtgatcgacggctctgagcactgtgagcaggaggtggcctaccactgcaggaggtcccgcctgctcaacacgccggatggaacaccatttacctggtggattgggcggtccaatgaaaggcacccttactggggaggttcccctcctggggtccagcagtgtgagtgtggcctagacgagagctgcctggacattcagcacttttgcaattgcgacgctgacaaggatgaatggacaaatgatactggctttctttccttcaaagaccacttgcctgtcactcagatagttatcactgataccgacagatcaaactcagaagccgcttggagaattggtcccttgcgttgctatggtgaccgacgcttctggaacgccgtctcattttatacagaagcctcttacctccactttcctaccttccatgcggaattcagtgccgatatttccttcttttttaaaaccacagcattatccggagttttcctagaaaatcttggcattaaagacttcattcgactcgaaataagctctccttcagagatcacctttgccatcgatgttgggaatggtcctgtggagcttgtagtccagtctccttctcttctgaatgacaaccaatggcactatgtccgggctgagaggaacctcaaggagacctccctgcaggtggacaaccttccaaggagcaccagggagacgtcggaggagggccattttcgactgcagctgaacagccagttgtttgtagggggaacgtcatccagacagaaaggcttcctaggatgcattcgctccttacacttgaatggacagaaaatggacctggaagagagggcaaaggtcacatctggagtcaggccaggctgccccggccactgcagcagctacggcagcatctgccacaacgggggcaagtgtgtggagaagcacaatggctacctgtgtgattgcaccaattcaccttatgaagggcccttttgcaaaaaagaggtttctgctgtttttgaggctggcacgtcggttacttacatgtttcaagaaccctatcctgtgaccaagaatataagcctctcatcctcagctatttacacagattcagctccatccaaggaaaacattgcacttagctttgtgacaacccaggcacccagtcttttgctctttatcaattcttcttctcaggacttcgtggttgttctgctctgcaagaatggaagcttacaggttcgctatcacctaaacaaggaagaaacccatgtattcaccattgatgcagataactttgctaacagaaggatgcaccacttgaagattaaccgagagggaagagagcttaccattcagatggaccagcaacttcgactcagttataacttctctccggaagtagagttcagggttataaggtcactcaccttgggcaaagtcacagagaatcttggtttggattctgaagttgctaaagcaaatgccatgggttttgctggatgcatgtcttccgtccagtacaaccacatagcaccactgaaggctgccctgcgccatgccactgtcgcgcctgtgactgtccatgggaccttgacggaatccagctgtggcttcatggtggactcagatgtgaatgcagtgaccacggtgcattcttcatcagatccttttgggaagacagatgagcgggaaccactcacaaatgctgttcgaagtgattcggcagtcatcggaggggtgatagcagtggtgatattcatcatcttctgtatcatcggcatcatgacccggttcctctaccagcacaagcagtcacatcgtacgagccagatgaaggagaaggaatatccagaaaatttggacagttccttcagaaatgaaattgacttgcaaaacacagtgagcgagtgtaaacgggaatatttcatctga

SEQ ID NO: 39 - protein, 1259 aa, Homo sapiens
  VARIANT (1)...(1259): Xaa = Any Amino Acid
MDSLPRLTSVLTLLFSGLWHLGLTATNYNCDDPLASLLSPMAFSSSSDLTGTHSPAQLNWRVGTGGWSPADSNAQQWLQMDLGNRVEITAVATQGRYGSSDWVTSYSLMFSDTGRNWKQYKQEDSIWTFAGNMNADSVVHHKLLHSVRARFVRFVPLEWNPSGKIGMRVEVYGCSYKSDVADFDGRSSLLYRFNQKLMSTLKDVISLKFKSMQGDGVLFHGEGQRGDHITLELQKGRLALHLNLGDSKARLSSSLPSATLGSLLDDQHWHXVLIERVGKQVNFTVDKHTQHFRTKGETDALDIDYEGNVTFSCSEPQIVPITFXNSSGSYLLLPGTPQIDGLSVSFQFRTWNKDGLLLSTELSEGSGTLLLSLEGGILRLVIQKMTERVAEILTGSNLNDGLWHSVSINARRNRITLTLDDEAAPPAPDSTWVQIYSGNSYYFGGCPDNLTDSQCLNPIKAFQGCMRLIFIDNQPKDLISVQQGSLGNFSDLHIDLCSIKDRCLPNYCEHGGSCSQSWTTFYCNCSDTSYTGATCHNSIYEQSCEVYRHQGNTAGFFYIDSDGSGPLGPLQVYCNITEDKIWTSVQHNNTELTRVRGANPEKPYAMALDYGGSMEQLEAVIDGSEHCEQEVAYHCRRSRLLNTPDGTPFTWWIGRSNERHPYWGGSPPGVQQCECGLDESCLDIQHFCNCDADKDEWTNDTGFLSFKDHLPVTQIVITDTDRSNSEAAWRIGPLRCYGDRRFWNAVSFYTEASYLHFPTFHAEFSADISFFFKTTALSGVFLENLGIKDFIRLEISSPSEITFAIDVGNGPVELVVQSPSLLNDNQWHYVRAERNLKETSLQVDNLPRSTRETSEEGHFRLQLNSQLFVGGTSSRQKGFLGCIRSLHLNGQKMDLEERAKVTSGVRPGCPGHCSSYGSICHNGGKCVEKHNGYLCDCTNSPYEGPFCKKEVSAVFEAGTSVTYMFQEPYPVTKNISLSSSAIYTDSAPSKENIALSFVTTQAPSLLLFINSSSQDFVVVLLCKNGSLQVRYHLNKEETHVFTIDADNFANRRMHHLKINREGRELTIQMDQQLRLSYNFSPEVEFRVIRSLTLGKVTENLGLDSEVAKANAMGFAGCMSSVQYNHIAPLKAALRHATVAPVTVHGTLTESSCGFMVDSDVNAVTTVHSSSDPFGKTDEREPLTNAVRSDSAVIGGVIAVVIFIIFCIIGIMTRFLYQHKQSHRTSQMKEKEYPENLDSSFRNEIDLQNTVSECKREYFI

SEQ ID NO: 40 - DNA, 108 bp, Homo sapiens
  CDS (1)...(108)
atggattctttaccacggctgaccagcgttttgactttgctgttctctggcttgtggcatttaggattaacagcgacaaactacctttgcaggaaacatgaatgctga

SEQ ID NO: 41 - protein, 35 aa, Homo sapiens
MDSLPRLTSVLTLLFSGLWHLGLTATNYLCRKHEC

SEQ ID NO: 42 - DNA, 753 bp, Homo sapiens
  CDS (1)...(753)
atggattctttaccacggctgaccagcgttttgactttgctgttctctggcttgtggcatttaggattaacagcgacaaactacaactgtgatgatccactagcatccctgctctctccaatggctttttccagttcctcagacctcactggcactcacagcccagctcaactcaactggagagttggaactggcggttggtccccagcagattccaatgctcaacagtggctccagatggacctgggaaacagagtagagattacagcagtggccacgcagggaagatacggaagctctgactgggtgacgagttacagcctgatgttcagtgacacaggacgcaactggaaacagtacaaacaagaagacagcatctggacctttgcaggaaacatgaatgctgacagcgtggtgcaccacaagctattgcactcagtgagagcccgatttgttcgctttgtgcccctggaatggaatcccagtgggaagattggcatgagagtcgaggtctacggatgttcctataaatcagacgttgctgactttgatggccgaagctcacttctgtacaggttcaatcagaagttgatgagtactctcaaagatgtgatctccctgaagttcaagagcatgcaaggagatggggtcctgttccatggagaaggtcagcgtggagaccacatcaccttggaactccagaaggggaggctcgccctacacctcaatttggtggtttgtagttctccttga

SEQ ID NO: 43 - protein, 250 aa, Homo sapiens
MDSLPRLTSVLTLLFSGLWHLGLTATNYNCDDPLASLLSPMAFSSSSDLTGTHSPAQLNWRVGTGGWSPADSNAQQWLQMDLGNRVEITAVATQGRYGSSDWVTSYSLMFSDTGRNWKQYKQEDSIWTFAGNMNADSVVHHKLLHSVRARFVRFVPLEWNPSGKIGMRVEVYGCSYKSDVADFDGRSSLLYRFNQKLMSTLKDVISLKFKSMQGDGVLFHGEGQRGDHITLELQKGRLALHLNLVVCSSP

SEQ ID NO: 44 - DNA, 840 bp, Homo sapiens
  CDS (1)...(840)
atggattctttaccacggctgaccagcgttttgactttgctgttctctggcttgtggcatttaggattaacagcgacaaactacaactgtgatgatccactagcatccctgctctctccaatggctttttccagttcctcagacctcactggcactcacagcccagctcaactcaactggagagttggaactggcggttggtccccagcagattccaatgctcaacagtggctccagatggacctgggaaacagagtagagattacagcagtggccacgcagggaagatacggaagctctgactgggtgacgagttacagcctgatgttcagtgacacaggacgcaactggaaacagtacaaacaagaagacagcatctggacctttgcaggaaacatgaatgctgacagcgtggtgcaccacaagctattgcactcagtgagagcccgatttgttcgctttgtgcccctggaatggaatcccagtgggaagattggcatgagagtcgaggtctacggatgttcctataaatcagacgttgctgactttgatggccgaagctcacttctgtacaggttcaatcagaagttgatgagtactctcaaagatgtgatctccctgaagttcaagagcatgcaaggagatggggtcctgttccatggagaaggtcagcgtggagaccacatcaccttggaactccagaaggggaggctcgccctacacctcaatttgggtgacagcaaagcgcggctaagcacttgccctctgccaccctgggcagcctcctggatgaccagcactggcactyggtcctcattgagcgggtgggcaagcaggtga

SEQ ID NO: 45 - protein, 279 aa, Homo sapiens
  VARIANT (1)...(279): Xaa = Any Amino Acid
MDSLPRLTSVLTLLFSGLWHLGLTATNYNCDDPLASLLSPMAFSSSSDLTGTHSPAQLNWRVGTGGWSPADSNAQQWLQMDLGNRVEITAVATQGRYGSSDWVTSYSLMFSDTGRNWKQYKQEDSIWTFAGNMNADSVVHHKLLHSVRARFVRFVPLEWNPSGKIGMRVEVYGCSYKSDVADFDGRSSLLYRFNQKLMSTLKDVISLKFKSMQGDGVLFHGEGQRGDHITLELQKGRLALHLNLGDSKARLSTCPLPPWAASWMTSTGTXSSLSGWASR

SEQ ID NO: 46 - DNA, 1749 bp, Homo sapiens
  CDS (1)...(1749)
atggattctttaccacggctgaccagcgttttgactttgctgttctctggcttgtggcatttaggattaacagcgacaaactacaactgtgatgatccactagcatccctgctctctccaatggctttttccagttcctcagacctcactggcactcacagcccagctcaactcaactggagagttggaactggcggttggtccccagcagattccaatgctcaacagtggctccagatggacctgggaaacagagtagagattacagcagtggccacgcagggaagatacggaagctctgactgggtgacgagttacagcctgatgttcagtgacacaggacgcaactggaaacagtacaaacaagaagacagcatctggacctttgcaggaaacatgaatgctgacagcgtggtgcaccacaagctattgcactcagtgagagcccgatttgttcgctttgtgcccctggaatggaatcccagtgggaagattggcatgagagtcgaggtctacggatgttcctataaatcagacgttgctgactttgatggccgaagctcacttctgtacaggttcaatcagaagttgatgagtactctcaaagatgtgatctccctgaagttcaagagcatgcaaggagatggggtcctgttccatggagaaggtcagcgtggagaccacatcaccttggaactccagaaggggaggctcgccctacacctcaatttgggtgacagcaaagcgcggctcagcagcagcttgccctctgccaccctgggcagcctcctggatgaccagcactggcactyggtcctcattgagcgggtgggcaagcaggtgaacttcacggtggacaagcacacacagcacttccgcaccaagggcgagacggatgccttagacattgactatgagcttagttttggaggaattccagtaccaggaaaacctgggacctttttaaagaaaaacttccatggatgcatcgaaaacctttactacaatggagtaaacataattracctggctaagagacgaaagcatcagatctatactgtgggcaatgtcactttttcctgctccgaaccacagattgtgcccatcacatttgtyaactccagcggcagctatttgctgctgcccggcaccccccaaattgatgggctctcagtgagtttccagtttcgaacatggaacaaggatggtctgcttctgtccacagagctgtctgagggctcgggaaccctgctgctgagcctggagggtggaatcctgagactcgtgattcagaaaatgacagaacgcgtagctgaaatcctcacaggcagcaacttgaatgatggcctgtggcactcggttagcatcaacgccaggaggaaccgcatcacgctcactctggatgatgaagcagcacccccggctccagacagcacttgggtgcagatttattctggaaatagctactattttggaggtgtttgccaaactactgtgaacatggaggaagctgctcccagtcctggactaccttctattgtaactgcagtgacacaagttacactggtgccacctgccacaactccatctacgagcaatcctgcgaggtgtacaggcaccaggggaatacagccggcttcttctacatcgactcagatggcagcggcccactgggacctctccaggtgtactgcaatatcactgaggacaagatctggacatcagtgcagcacaacaatacagagctga

SEQ ID NO: 47 - protein, 582 aa, Homo sapiens
  VARIANT (1)...(582): Xaa = Any Amino Acid
MDSLPRLTSVLTLLFSGLWHLGLTATNYNCDDPLASLLSPMAFSSSSDLTGTHSPAQLNWRVGTGGWSPADSNAQQWLQMDLGNRVEITAVATQGRYGSSDWVTSYSLMFSDTGRNWKQYKQEDSIWTFAGNMNADSVVHHKLLHSVRARFVRFVPLEWNPSGKIGMRVEVYGCSYKSDVADFDGRSSLLYRFNQKLMSTLKDVISLKFKSMQGDGVLFHGEGQRGDHITLELQKGRLALHLNLGDSKARLSSSLPSATLGSLLDDQHWHXVLIERVGKQVNFTVDKHTQHFRTKGETDALDIDYELSFGGIPVPGKPGTFLKKNFHGCIENLYYNGVNIIXLAKRRKHQIYTVGNVTFSCSEPQIVPITFXNSSGSYLLLPGTPQIDGLSVSFQFRTWNKDGLLLSTELSEGSGTLLLSLEGGILRLVIQKMTERVAEILTGSNLNDGLWHSVSINARRNRITLTLDDEAAPPAPDSTWVQIYSGNSYYFGGVCQTTVNMEEAAPSPGLPSIVTAVTQVTLVPPATTPSTSNPARCTGTRGIQPASSTSTQMAAAHWDLSRCTAISLRTRSGHQCSTTIQS

SEQ ID NO: 48 - DNA, 1605 bp, Homo sapiens
  CDS (1)...(1605)
atggattctttaccacggctgaccagcgttttgactttgctgttctctggcttgtggcatttaggattaacagcgacaaactacaactgtgatgatccactagcatccctgctctctccaatggctttttccagttcctcagacctcactggcactcacagcccagctcaactcaactggagagttggaactggcggttggtccccagcagattccaatgctcaacagtggctccagatggacctgggaaacagagtagagattacagcagtggccacgcagggaagatacggaagctctgactgggtgacgagttacagcctgatgttcagtgacacaggacgcaactggaaacagtacaaacaagaagacagcatctggacctttgcaggaaacatgaatgctgacagcgtggtgcaccacaagctattgcactcagtgagagcccgatttgttcgctttgtgcccctggaatggaatcccagtgggaagattggcatgagagtcgaggtctacggatgttcctataaatcagacgttgctgactttgatggccgaagctcacttctgtacaggttcaatcagaagttgatgagtactctcaaagatgtgatctccctgaagttcaagagcatgcaaggagatggggtcctgttccatggagaaggtcagcgtggagaccacatcaccttggaactccagaaggggaggctcgccctacacctcaatttgggtgacagcaaagcgcggctcagcagcagcttgccctctgccaccctgggcagcctcctggatgaccagcactggcactyggtcctcattgagcgggtgggcaagcaggtgaacttcacggtggacaagcacacacagcacttccgcaccaagggcgagacggatgccttagacattgactatgagggcaatgtcactttttcctgctccgaaccacagattgtgcccatcacatttgtyaactccagcggcagctatttgctgctgcccggcaccccccaaattgatgggctctcagtgagtttccagtttcgaacatggaacaaggatggtctgcttctgtccacagagctgtctgagggctcgggaaccctgctgctgagcctggagggtggaatcctgagactcgtgattcagaaaatgacagaacgcgtagctgaaatcctcacaggcagcaacttgaatgatggcctgtggcactcggttagcatcaacgccaggaggaaccgcatcacgctcactctggatgatgaagcagcacccccggctccagacagcacttgggtgcagatttattctggaaatagctactattttggaggtgtttgccaaactactgtgaacatggaggaagctgctcccagtcctggactaccttctattgtaactgcagtgacacaagttacactggtgccacctgccacaactccatctacgagcaatcctgcgaggtgtacaggcaccaggggaatacagccggcttcttctacatcgactcagatggcagcggcccactgggacctctccaggtgtactgcaatatcactgaggacaagatctggacatcagtgcagcacaacaatacagagctga

SEQ ID NO: 49 - protein, 534 aa, Homo sapiens
  VARIANT (1)...(534): Xaa = Any Amino Acid
MDSLPRLTSVLTLLFSGLWHLGLTATNYNCDDPLASLLSPMAFSSSSDLTGTHSPAQLNWRVGTGGWSPADSNAQQWLQMDLGNRVEITAVATQGRYGSSDWVTSYSLMFSDTGRNWKQYKQEDSIWTFAGNMNADSVVHHKLLHSVRARFVRFVPLEWNPSGKIGMRVEVYGCSYKSDVADFDGRSSLLYRFNQKLMSTLKDVISLKFKSMQGDGVLFHGEGQRGDHITLELQKGRLALHLNLGDSKARLSSSLPSATLGSLLDDQHWHXVLIERVGKQVNFTVDKHTQHFRTKGETDALDIDYEGNVTFSCSEPQIVPITFXNSSGSYLLLPGTPQIDGLSVSFQFRTWNKDGLLLSTELSEGSGTLLLSLEGGILRLVIQKMTERVAEILTGSNLNDGLWHSVSINARRNRITLTLDDEAAPPAPDSTWVQIYSGNSYYFGGVCQTTVNMEEAAPSPGLPSIVTAVTQVTLVPPATTPSTSNPARCTGTRGIQPASSTSTQMAAAHWDLSRCTAISLRTRSGHQCSTTIQS

SEQ ID NO: 50 - DNA, 2238 bp, Homo sapiens
  CDS (1)...(2238)
atggattctttaccacggctgaccagcgttttgactttgctgttctctggcttgtggcatttaggattaacagcgacaaactacaactgtgatgatccactagcatccctgctctctccaatggctttttccagttcctcagacctcactggcactcacagcccagctcaactcaactggagagttggaactggcggttggtccccagcagattccaatgctcaacagtggctccagatggacctgggaaacagagtagagattacagcagtggccacgcagggaagatacggaagctctgactgggtgacgagttacagcctgatgttcagtgacacaggacgcaactggaaacagtacaaacaagaagacagcatctggacctttgcaggaaacatgaatgctgacagcgtggtgcaccacaagctattgcactcagtgagagcccgatttgttcgctttgtgcccctggaatggaatcccagtgggaagattggcatgagagtcgaggtctacggatgttcctataaatcagacgttgctgactttgatggccgaagctcacttctgtacaggttcaatcagaagttgatgagtactctcaaagatgtgatctccctgaagttcaagagcatgcaaggagatggggtcctgttccatggagaaggtcagcgtggagaccacatcaccttggaactccagaaggggaggctcgccctacacctcaatttgggtgacagcaaagcgcggctcagcagcagcttgccctctgccaccctgggcagcctcctggatgaccagcactggcactyggtcctcattgagcgggtgggcaagcaggtgaacttcacggtggacaagcacacacagcacttccgcaccaagggcgagacggatgccttagacattgactatgagcttagttttggaggaattccagtaccaggaaaacctgggacctttttaaagaaaaacttccatggatgcatcgaaaacctttactacaatggagtaaacataattracctggctaagagacgaaagcatcagatctatactgtgggcaatgtcactttttcctgctccgaaccacagattgtgcccatcacatttgtyaactccagcggcagctatttgctgctgcccggcaccccccaaattgatgggctctcagtgagtttccagtttcgaacatggaacaaggatggtctgcttctgtccacagagctgtctgagggctcgggaaccctgctgctgagcctggagggtggaatcctgagactcgtgattcagaaaatgacagaacgcgtagctgaaatcctcacaggcagcaacttgaatgatggcctgtggcactcggttagcatcaacgccaggaggaaccgcatcacgctcactctggatgatgaagcagcacccccggctccagacagcacttgggtgcagatttattctggaaatagctactattttggagggtgccccgacaatctcaccgattcccaatgtttaaatcccattaaggctttccaaggctgcatgaggctcatctttattgataaccagcccaaggacctcatttcagttcagcaaggttccctggggaattttagtgatttacacattgatctgtgtagcatcaaagacaggtgtttgccaaactactgtgaacatggaggaagctgctcccagtcctggactaccttctattgtaactgcagtgacacaagttacactggtgccacctgccacaactccatctacgagcaatcctgcgaggtgtacaggcaccaggggaatacagccggcttcttctacatcgactcagatggcagcggcccactgggacctctccaggtgtactgcaatatcactgaggacaagatctggacatcagtgcagcacaacaatacagagctgacccgagtgcggggcgctaaccctgagaagccctatgccatggccttggactacgggggcagcatggaacagctggaggccgtgatcgacggctctgagcactgtgagcaggaggtggcctaccactgcaggaggtcccgcctgctcaacacgccggatggaacaccatttacctggtggattgggcggtccaatgaaaggcacccttactggggaggttcccctcctggggtccagcagtgtgagtgtggcctagacgagagctgcctggacattcagcacttttgcaattgcgacgctgacaaggatgaatggtaa

SEQ ID NO: 51 - protein, 745 aa, Homo sapiens
  VARIANT (1)...(745): Xaa = Any Amino Acid
MDSLPRLTSVLTLLFSGLWHLGLTATNYNCDDPLASLLSPMAFSSSSDLTGTHSPAQLNWRVGTGGWSPADSNAQQWLQMDLGNRVEITAVATQGRYGSSDWVTSYSLMFSDTGRNWKQYKQEDSIWTFAGNMNADSVVHHKLLHSVRARFVRFVPLEWNPSGKIGMRVEVYGCSYKSDVADFDGRSSLLYRFNQKLMSTLKDVISLKFKSMQGDGVLFHGEGQRGDHITLELQKGRLALHLNLGDSKARLSSSLPSATLGSLLDDQHWHXVLIERVGKQVNFTVDKHTQHFRTKGETDALDIDYELSFGGIPVPGKPGTFLKKNFHGCIENLYYNGVNIIXLAKRRKHQIYTVGNVTFSCSEPQIVPITFXNSSGSYLLLPGTPQIDGLSVSFQFRTWNKDGLLLSTELSEGSGTLLLSLEGGILRLVIQKMTERVAEILTGSNLNDGLWHSVSINARRNRITLTLDDEAAPPAPDSTWVQIYSGNSYYFGGCPDNLTDSQCLNPIKAFQGCMRLIFIDNQPKDLISVQQGSLGNFSDLHIDLCSIKDRCLPNYCEHGGSCSQSWTTFYCNCSDTSYTGATCHNSIYEQSCEVYRHQGNTAGFFYIDSDGSGPLGPLQVYCNITEDKIWTSVQHNNTELTRVRGANPEKPYAMALDYGGSMEQLEAVIDGSEHCEQEVAYHCRRSRLLNTPDGTPFTWWIGRSNERHPYWGGSPPGVQQCECGLDESCLDIQHFCNCDADKDEW

SEQ ID NO: 52 - DNA, 2094 bp, Homo sapiens
  CDS (1)...(2094)
atggattctttaccacggctgaccagcgttttgactttgctgttctctggcttgtggcatttaggattaacagcgacaaactacaactgtgatgatccactagcatccctgctctctccaatggctttttccagttcctcagacctcactggcactcacagcccagctcaactcaactggagagttggaactggcggttggtccccagcagattccaatgctcaacagtggctccagatggacctgggaaacagagtagagattacagcagtggccacgcagggaagatacggaagctctgactgggtgacgagttacagcctgatgttcagtgacacaggacgcaactggaaacagtacaaacaagaagacagcatctggacctttgcaggaaacatgaatgctgacagcgtggtgcaccacaagctattgcactcagtgagagcccgatttgttcgctttgtgcccctggaatggaatcccagtgggaagattggcatgagagtcgaggtctacggatgttcctataaatcagacgttgctgactttgatggccgaagctcacttctgtacaggttcaatcagaagttgatgagtactctcaaagatgtgatctccctgaagttcaagagcatgcaaggagatggggtcctgttccatggagaaggtcagcgtggagaccacatcaccttggaactccagaaggggaggctcgccctacacctcaatttgggtgacagcaaagcgcggctcagcagcagcttgccctctgccaccctgggcagcctcctggatgaccagcactggcactyggtcctcattgagcgggtgggcaagcaggtgaacttcacggtggacaagcacacacagcacttccgcaccaagggcgagacggatgccttagacattgactatgagggcaatgtcactttttcctgctccgaaccacagattgtgcccatcacatttgtyaactccagcggcagctatttgctgctgcccggcaccccccaaattgatgggctctcagtgagtttccagtttcgaacatggaacaaggatggtctgcttctgtccacagagctgtctgagggctcgggaaccctgctgctgagcctggagggtggaatcctgagactcgtgattcagaaaatgacagaacgcgtagctgaaatcctcacaggcagcaacttgaatgatggcctgtggcactcggttagcatcaacgccaggaggaaccgcatcacgctcactctggatgatgaagcagcacccccggctccagacagcacttgggtgcagatttattctggaaatagctactattttggagggtgccccgacaatctcaccgattcccaatgtttaaatcccattaaggctttccaaggctgcatgaggctcatctttattgataaccagcccaaggacctcatttcagttcagcaaggttccctggggaattttagtgatttacacattgatctgtgtagcatcaaagacaggtgtttgccaaactactgtgaacatggaggaagctgctcccagtcctggactaccttctattgtaactgcagtgacacaagttacactggtgccacctgccacaactccatctacgagcaatcctgcgaggtgtacaggcaccaggggaatacagccggcttcttctacatcgactcagatggcagcggcccactgggacctctccaggtgtactgcaatatcactgaggacaagatctggacatcagtgcagcacaacaatacagagctgacccgagtgcggggcgctaaccctgagaagccctatgccatggccttggactacgggggcagcatggaacagctggaggccgtgatcgacggctctgagcactgtgagcaggaggtggcctaccactgcaggaggtcccgcctgctcaacacgccggatggaacaccatttacctggtggattgggcggtccaatgaaaggcacccttactggggaggttcccctcctggggtccagcagtgtgagtgtggcctagacgagagctgcctggacattcagcacttttgcaattgcgacgctgacaaggatgaatggtaa

SEQ ID NO: 53 - protein, 697 aa, Homo sapiens
  VARIANT (1)...(697): Xaa = Any Amino Acid
MDSLPRLTSVLTLLFSGLWHLGLTATNYNCDDPLASLLSPMAFSSSSDLTGTHSPAQLNWRVGTGGWSPADSNAQQWLQMDLGNRVEITAVATQGRYGSSDWVTSYSLMFSDTGRNWKQYKQEDSIWTFAGNMNADSVVHHKLLHSVRARFVRFVPLEWNPSGKIGMRVEVYGCSYKSDVADFDGRSSLLYRFNQKLMSTLKDVISLKFKSMQGDGVLFHGEGQRGDHITLELQKGRLALHLNLGDSKARLSSSLPSATLGSLLDDQHWHXVLIERVGKQVNFTVDKHTQHFRTKGETDALDIDYEGNVTFSCSEPQIVPITFXNSSGSYLLLPGTPQIDGLSVSFQFRTWNKDGLLLSTELSEGSGTLLLSLEGGILRLVIQKMTERVAEILTGSNLNDGLWHSVSINARRNRITLTLDDEAAPPAPDSTWVQIYSGNSYYFGGCPDNLTDSQCLNPIKAFQGCMRLIFIDNQPKDLISVQQGSLGNFSDLHIDLCSIKDRCLPNYCEHGGSCSQSWTTFYCNCSDTSYTGATCHNSIYEQSCEVYRHQGNTAGFFYIDSDGSGPLGPLQVYCNITEDKIWTSVQHNNTELTRVRGANPEKPYAMALDYGGSMEQLEAVIDGSEHCEQEVAYHCRRSRLLNTPDGTPFTWWIGRSNERHPYWGGSPPGVQQCECGLDESCLDIQHFCNCDADKDEW

SEQ ID NO: 54 - DNA, 2520 bp, Homo sapiens
  CDS (1)...(2520)
atggattctttaccacggctgaccagcgttttgactttgctgttctctggcttgtggcatttaggattaacagcgacaaactacaactgtgatgatccactagcatccctgctctctccaatggctttttccagttcctcagacctcactggcactcacagcccagctcaactcaactggagagttggaactggcggttggtccccagcagattccaatgctcaacagtggctccagatggacctgggaaacagagtagagattacagcagtggccacgcagggaagatacggaagctctgactgggtgacgagttacagcctgatgttcagtgacacaggacgcaactggaaacagtacaaacaagaagacagcatctggacctttgcaggaaacatgaatgctgacagcgtggtgcaccacaagctattgcactcagtgagagcccgatttgttcgctttgtgcccctggaatggaatcccagtgggaagattggcatgagagtcgaggtctacggatgttcctataaatcagacgttgctgactttgatggccgaagctcacttctgtacaggttcaatcagaagttgatgagtactctcaaagatgtgatctccctgaagttcaagagcatgcaaggagatggggtcctgttccatggagaaggtcagcgtggagaccacatcaccttggaactccagaaggggaggctcgccctacacctcaatttgggtgacagcaaagcgcggctcagcagcagcttgccctctgccaccctgggcagcctcctggatgaccagcactggcactyggtcctcattgagcgggtgggcaagcaggtgaacttcacggtggacaagcacacacagcacttccgcaccaagggcgagacggatgccttagacattgactatgagcttagttttggaggaattccagtaccaggaaaacctgggacctttttaaagaaaaacttccatggatgcatcgaaaacctttactacaatggagtaaacataattracctggctaagagacgaaagcatcagatctatactgtgggcaatgtcactttttcctgctccgaaccacagattgtgcccatcacatttgtyaactccagcggcagctatttgctgctgcccggcaccccccaaattgatgggctctcagtgagtttccagtttcgaacatggaacaaggatggtctgcttctgtccacagagctgtctgagggctcgggaaccctgctgctgagcctggagggtggaatcctgagactcgtgattcagaaaatgacagaacgcgtagctgaaatcctcacaggcagcaacttgaatgatggcctgtggcactcggttagcatcaacgccaggaggaaccgcatcacgctcactctggatgatgaagcagcacccccggctccagacagcacttgggtgcagatttattctggaaatagctactattttggagggtgccccgacaatctcaccgattcccaatgtttaaatcccattaaggctttccaaggctgcatgaggctcatctttattgataaccagcccaaggacctcatttcagttcagcaaggttccctggggaattttagtgatttacacattgatctgtgtagcatcaaagacaggtgtttgccaaactactgtgaacatggaggaagctgctcccagtcctggactaccttctattgtaactgcagtgacacaagttacactggtgccacctgccacaactccatctacgagcaatcctgcgaggtgtacaggcaccaggggaatacagccggcttcttctacatcgactcagatggcagcggcccactgggacctctccaggtgtactgcaatatcactgaggacaagatctggacatcagtgcagcacaacaatacagagctgacccgagtgcggggcgctaaccctgagaagccctatgccatggccttggactacgggggcagcatggaacagctggaggccgtgatcgacggctctgagcactgtgagcaggaggtggcctaccactgcaggaggtcccgcctgctcaacacgccggatggaacaccatttacctggtggattgggcggtccaatgaaaggcacccttactggggaggttcccctcctggggtccagcagtgtgagtgtggcctagacgagagctgcctggacattcagcacttttgcaattgcgacgctgacaaggatgaatggacaaatgatactggctttctttccttcaaagaccacttgcctgtcactcagatagttatcactgataccgacagatcaaactcagaagccgcttggagaattggtcccttgcgttgctatggtgaccgtgagtacaaaatcgaaagaagctttctctctgcattacatgagcacaagatgttcttactcccttatcccttttccctgcagtgtgccctagtcttgaaaattatccacatgtccagtgctttcccataccccactgaaaacgataaaccatgttga

SEQ ID NO: 55 - protein, 839 aa, Homo sapiens
  VARIANT (1)...(839): Xaa = Any Amino Acid
MDSLPRLTSVLTLLFSGLWHLGLTATNYNCDDPLASLLSPMAFSSSSDLTGTHSPAQLNWRVGTGGWSPADSNAQQWLQMDLGNRVEITAVATQGRYGSSDWVTSYSLMFSDTGRNWKQYKQEDSIWTFAGNMNADSVVHHKLLHSVRARFVRFVPLEWNPSGKIGMRVEVYGCSYKSDVADFDGRSSLLYRFNQKLMSTLKDVISLKFKSMQGDGVLFHGEGQRGDHITLELQKGRLALHLNLGDSKARLSSSLPSATLGSLLDDQHWHXVLIERVGKQVNFTVDKHTQHFRTKGETDALDIDYELSFGGIPVPGKPGTFLKKNFHGCIENLYYNGVNIIXLAKRRKHQIYTVGNVTFSCSEPQIVPITFXNSSGSYLLLPGTPQIDGLSVSFQFRTWNKDGLLLSTELSEGSGTLLLSLEGGILRLVIQKMTERVAEILTGSNLNDGLWHSVSINARRNRITLTLDDEAAPPAPDSTWVQIYSGNSYYFGGCPDNLTDSQCLNPIKAFQGCMRLIFIDNQPKDLISVQQGSLGNFSDLHIDLCSIKDRCLPNYCEHGGSCSQSWTTFYCNCSDTSYTGATCHNSIYEQSCEVYRHQGNTAGFFYIDSDGSGPLGPLQVYCNITEDKIWTSVQHNNTELTRVRGANPEKPYAMALDYGGSMEQLEAVIDGSEHCEQEVAYHCRRSRLLNTPDGTPFTWWIGRSNERHPYWGGSPPGVQQCECGLDESCLDIQHFCNCDADKDEWTNDTGFLSFKDHLPVTQIVITDTDRSNSEAAWRIGPLRCYGDREYKIERSFLSALHEHKMFLLPYPFSLQCALVLKIIHMSSAFPYPTENDKPC

SEQ ID NO: 56 - DNA, 2376 bp, Homo sapiens
  CDS (1)...(2376)
atggattctttaccacggctgaccagcgttttgactttgctgttctctggcttgtggcatttaggattaacagcgacaaactacaactgtgatgatccactagcatccctgctctctccaatggctttttccagttcctcagacctcactggcactcacagcccagctcaactcaactggagagttggaactggcggttggtccccagcagattccaatgctcaacagtggctccagatggacctgggaaacagagtagagattacagcagtggccacgcagggaagatacggaagctctgactgggtgacgagttacagcctgatgttcagtgacacaggacgcaactggaaacagtacaaacaagaagacagcatctggacctttgcaggaaacatgaatgctgacagcgtggtgcaccacaagctattgcactcagtgagagcccgatttgttcgctttgtgcccctggaatggaatcccagtgggaagattggcatgagagtcgaggtctacggatgttcctataaatcagacgttgctgactttgatggccgaagctcacttctgtacaggttcaatcagaagttgatgagtactctcaaagatgtgatctccctgaagttcaagagcatgcaaggagatggggtcctgttccatggagaaggtcagcgtggagaccacatcaccttggaactccagaaggggaggctcgccctacacctcaatttgggtgacagcaaagcgcggctcagcagcagcttgccctctgccaccctgggcagcctcctggatgaccagcactggcactyggtcctcattgagcgggtgggcaagcaggtgaacttcacggtggacaagcacacacagcacttccgcaccaagggcgagacggatgccttagacattgactatgagggcaatgtcactttttcctgctccgaaccacagattgtgcccatcacatttgtyaactccagcggcagctatttgctgctgcccggcaccccccaaattgatgggctctcagtgagtttccagtttcgaacatggaacaaggatggtctgcttctgtccacagagctgtctgagggctcgggaaccctgctgctgagcctggagggtggaatcctgagactcgtgattcagaaaatgacagaacgcgtagctgaaatcctcacaggcagcaacttgaatgatggcctgtggcactcggttagcatcaacgccaggaggaaccgcatcacgctcactctggatgatgaagcagcacccccggctccagacagcacttgggtgcagatttattctggaaatagctactattttggagggtgccccgacaatctcaccgattcccaatgtttaaatcccattaaggctttccaaggctgcatgaggctcatctttattgataaccagcccaaggacctcatttcagttcagcaaggttccctggggaattttagtgatttacacattgatctgtgtagcatcaaagacaggtgtttgccaaactactgtgaacatggaggaagctgctcccagtcctggactaccttctattgtaactgcagtgacacaagttacactggtgccacctgccacaactccatctacgagcaatcctgcgaggtgtacaggcaccaggggaatacagccggcttcttctacatcgactcagatggcagcggcccactgggacctctccaggtgtactgcaatatcactgaggacaagatctggacatcagtgcagcacaacaatacagagctgacccgagtgcggggcgctaaccctgagaagccctatgccatggccttggactacgggggcagcatggaacagctggaggccgtgatcgacggctctgagcactgtgagcaggaggtggcctaccactgcaggaggtcccgcctgctcaacacgccggatggaacaccatttacctggtggattgggcggtccaatgaaaggcacccttactggggaggttcccctcctggggtccagcagtgtgagtgtggcctagacgagagctgcctggacattcagcacttttgcaattgcgacgctgacaaggatgaatggacaaatgatactggctttctttccttcaaagaccacttgcctgtcactcagatagttatcactgataccgacagatcaaactcagaagccgcttggagaattggtcccttgcgttgctatggtgaccgtgagtacaaaatcgaaagaagctttctctctgcattacatgagcacaagatgttcttactcccttatcccttttccctgcagtgtgccctagtcttgaaaattatccacatgtccagtgctttcccataccccactgaaaacgataaaccatgttga

SEQ ID NO: 57 - protein, 791 aa, Homo sapiens
  VARIANT (1)...(791): Xaa = Any Amino Acid
MDSLPRLTSVLTLLFSGLWHLGLTATNYNCDDPLASLLSPMAFSSSSDLTGTHSPAQLNWRVGTGGWSPADSNAQQWLQMDLGNRVEITAVATQGRYGSSDWVTSYSLMFSDTGRNWKQYKQEDSIWTFAGNMNADSVVHHKLLHSVRARFVRFVPLEWNPSGKIGMRVEVYGCSYKSDVADFDGRSSLLYRFNQKLMSTLKDVISLKFKSMQGDGVLFHGEGQRGDHITLELQKGRLALHLNLGDSKARLSSSLPSATLGSLLDDQHWHXVLIERVGKQVNFTVDKHTQHFRTKGETDALDIDYEGNVTFSCSEPQIVPITFXNSSGSYLLLPGTPQIDGLSVSFQFRTWNKDGLLLSTELSEGSGTLLLSLEGGILRLVIQKMTERVAEILTGSNLNDGLWHSVSINARRNRITLTLDDEAAPPAPDSTWVQIYSGNSYYFGGCPDNLTDSQCLNPIKAFQGCMRLIFIDNQPKDLISVQQGSLGNFSDLHIDLCSIKDRCLPNYCEHGGSCSQSWTTFYCNCSDTSYTGATCHNSIYEQSCEVYRHQGNTAGFFYIDSDGSGPLGPLQVYCNITEDKIWTSVQHNNTELTRVRGANPEKPYAMALDYGGSMEQLEAVIDGSEHCEQEVAYHCRRSRLLNTPDGTPFTWWIGRSNERHPYWGGSPPGVQQCECGLDESCLDIQHFCNCDADKDEWTNDTGFLSFKDHLPVTQIVITDTDRSNSEAAWRIGPLRCYGDREYKIERSFLSALHEHKMFLLPYPFSLQCALVLKIIHMSSAFPYPTENDKPC

SEQ ID NO: 58 - DNA, 3897 bp, Homo sapiens
  CDS (1)...(3897)
atgtttcttgctaatagaatctggtctctctccctctgtcctcctatcattatagacaactgtgatgatccactagcatccctgctctctccaatggctttttccagttcctcagacctcactggcactcacagcccagctcaactcaactggagagttggaactggcggttggtccccagcagattccaatgctcaacagtggctccagatggacctgggaaacagagtagagattacagcagtggccacgcagggaagatacggaagctctgactgggtgacgagttacagcctgatgttcagtgacacaggacgcaactggaaacagtacaaacaagaagacagcatctggacctttgcaggaaacatgaatgctgacagcgtggtgcaccacaagctattgcactcagtgagagcccgatttgttcgctttgtgcccctggaatggaatcccagtgggaagattggcatgagagtcgaggtctacggatgttcctataaatcagacgttgctgactttgatggccgaagctcacttctgtacaggttcaatcagaagttgatgagtactctcaaagatgtgatctccctgaagttcaagagcatgcaaggagatggggtcctgttccatggagaaggtcagcgtggagaccacatcaccttggaactccagaaggggaggctcgccctacacctcaatttgggtgacagcaaagcgcggctcagcagcagcttgccctctgccaccctgggcagcctcctggatgaccagcactggcactcggtcctcattgagcgggtgggcaagcaggtgaacttcacggtggacaagcacacacagcacttccgcaccaagggcgagacggatgccttagacattgactatgagcttagttttggaggaattccagtaccaggaaaacctgggacctttttaaagaaaaacttccatggatgcatcgaaaacctttactacaatggagtaaacataattgacctggctaagagacgaaagcatcagatctatactgtgggcaatgtcactttttcctgctccgaaccacagattgtgcccatcacatttgtcaactccagcggcagctatttgctgctgcccggcaccccccaaattgatgggctctcagtgagtttccagtttcgaacatggaacaaggatggtctgcttctgtccacagagctgtctgagggctcgggaaccctgctgctgagcctggagggtggaatcctgagactcgtgattcagaaaatgacagaacgcgtagctgaaatcctcacaggcagcaacttgaatgatggcctgtggcactcggttagcatcaacgccaggaggaaccgcatcacgctcactctggatgatgaagcagcacccccggctccagacagcacttgggtgcagatttattctggaaatagctactattttggagggtgccccgacaatctcaccgattcccaatgtttaaatcccattaaggctttccaaggctgcatgaggctcatctttattgataaccagcccaaggacctcatttcagttcagcaaggttccctggggaattttagtgatttacacattgatctgtgtagcatcaaagacaggtgtttgccaaactactgtgaacatggaggaagctgctcccagtcctggactaccttctattgtaactgcagtgacacaagttacactggtgccacctgccacaactccatctacgagcaatcctgcgaggtgtacaggcaccaggggaatacagccggcttcttctacatcgactcagatggcagcggcccactgggacctctccaggtgtactgcaatatcactgaggacaagatctggacatcagtgcagcacaacaatacagagctgacccgagtgcggggcgctaaccctgagaagccctatgccatggccttggactacgggggcagcatggaacagctggaggccgtgatcgacggctctgagcactgtgagcaggaggtggcctaccactgcaggaggtcccgcctgctcaacacgccggatggaacaccatttacctggtggattgggcggtccaatgaaaggcacccttactggggaggttcccctcctggggtccagcagtgtgagtgtggcctagacgagagctgcctggacattcagcacttttgcaattgcgacgctgacaaggatgaatggacaaatgatactggctttctttccttcaaagaccacttgcctgtcactcagatagttatcactgataccgacagatcaaactcagaagccgcttggagaattggtcccttgcgttgctatggtgaccgacgcttctggaacgccgtctcattttatacagaagcctcttacctccactttcctaccttccatgcggaattcagtgccgatatttccttcttttttaaaaccacagcattatccggagttttcctagaaaatcttggcattaaagacttcattcgactcgaaataagctctccttcagagatcacctttgccatcgatgttgggaatggtcctgtggagcttgtagtccagtctccttctcttctgaatgacaaccaatggcactatgtccgggctgagaggaacctcaaggagacctccctgcaggtggacaaccttccaaggagcaccagggagacgtcggaggagggccattttcgactgcagctgaacagccagttgtttgtagggggaacgtcatccagacagaaaggcttcctaggatgcattcgctccttacacttgaatggacagaaaatggacctggaagagagggcaaaggtcacatctggagtcaggccaggctgccccggccactgcagcagctacggcagcatctgccacaacgggggcaagtgtgtggagaagcacaatggctacctgtgtgattgcaccaattcaccttatgaagggcccttttgcaaaaaagaggtttctgctgtttttgaggctggcacgtcggttacttacatgtttcaagaaccctatcctgtgaccaagaatataagcctctcatcctcagctatttacacagattcagctccatccaaggaaaacattgcacttagctttgtgacaacccaggcacccagtcttttgctctttatcaattcttcttctcaggacttcgtggttgttctgctctgcaagaatggaagcttacaggttcgctatcacctaaacaaggaagaaacccatgtattcaccattgatgcagataactttgctaacagaaggatgcaccacttgaagattaaccgagagggaagagagcttaccattcagatggaccagcaacttcgactcagttataacttctctccggaagtagagttcagggttataaggtcactcaccttgggcaaagtcacagagaatcttggtttggattctgaagttgctaaagcaaatgccatgggttttgctggatgcatgtcttccgtccagtacaaccacatagcaccactgaaggctgccctgcgccatgccactgtcgcgcctgtgactgtccatgggaccttgacggaatccagctgtggcttcatggtggactcagatgtgaatgcagtgaccacggtgcattcttcatcagatccttttgggaagacagatgagcgggaaccactcacaaatgctgttcgaagtgattcggcagtcatcggaggggtgatagcagtggtgatattcatcatcttctgtatcatcggcatcatgacccggttcctctaccagcacaagcagtcacatcgtacgagccagatgaaggagaaggaatatccagaaaatttggacagttccttcagaaatgaaattgacttgcaaaacacagtgagcgagtgtaaacgggaatatttcatctga

SEQ ID NO: 59 - protein, 1298 aa, Homo sapiens
MFLANRIWSLSLCPPIIIDNCDDPLASLLSPMAFSSSSDLTGTHSPAQLNWRVGTGGWSPADSNAQQWLQMDLGNRVEITAVATQGRYGSSDWVTSYSLMFSDTGRNWKQYKQEDSIWTFAGNMNADSVVHHKLLHSVRARFVRFVPLEWNPSGKIGMRVEVYGCSYKSDVADFDGRSSLLYRFNQKLMSTLKDVISLKFKSMQGDGVLFHGEGQRGDHITLELQKGRLALHLNLGDSKARLSSSLPSATLGSLLDDQHWHSVLIERVGKQVNFTVDKHTQHFRTKGETDALDIDYELSFGGIPVPGKPGTFLKKNFHGCIENLYYNGVNIIDLAKRRKHQIYTVGNVTFSCSEPQIVPITFVNSSGSYLLLPGTPQIDGLSVSFQFRTWNKDGLLLSTELSEGSGTLLLSLEGGILRLVIQKMTERVAEILTGSNLNDGLWHSVSINARRNRITLTLDDEAAPPAPDSTWVQIYSGNSYYFGGCPDNLTDSQCLNPIKAFQGCMRLIFIDNQPKDLISVQQGSLGNFSDLHIDLCSIKDRCLPNYCEHGGSCSQSWTTFYCNCSDTSYTGATCHNSIYEQSCEVYRHQGNTAGFFYIDSDGSGPLGPLQVYCNITEDKIWTSVQHNNTELTRVRGANPEKPYAMALDYGGSMEQLEAVIDGSEHCEQEVAYHCRRSRLLNTPDGTPFTWWIGRSNERHPYWGGSPPGVQQCECGLDESCLDIQHFCNCDADKDEWTNDTGFLSFKDHLPVTQIVITDTDRSNSEAAWRIGPLRCYGDRRFWNAVSFYTEASYLHFPTFHAEFSADISFFFKTTALSGVFLENLGIKDFIRLEISSPSEITFAIDVGNGPVELVVQSPSLLNDNQWHYVRAERNLKETSLQVDNLPRSTRETSEEGHFRLQLNSQLFVGGTSSRQKGFLGCIRSLHLNGQKMDLEERAKVTSGVRPGCPGHCSSYGSICHNGGKCVEKHNGYLCDCTNSPYEGPFCKKEVSAVFEAGTSVTYMFQEPYPVTKNISLSSSAIYTDSAPSKENIALSFVTTQAPSLLLFINSSSQDFVVVLLCKNGSLQVRYHLNKEETHVFTIDADNFANRRMHHLKINREGRELTIQMDQQLRLSYNFSPEVEFRVIRSLTLGKVTENLGLDSEVAKANAMGFAGCMSSVQYNHIAPLKAALRHATVAPVTVHGTLTESSCGFMVDSDVNAVTTVHSSSDPFGKTDEREPLTNAVRSDSAVIGGVIAVVIFIIFCIIGIMTRFLYQHKQSHRTSQMKEKEYPENLDSSFRNEIDLQNTVSECKREYFI

SEQ ID NO: 60 - DNA, 3528 bp, Homo sapiens
  CDS (1)...(3528)
atgaatgctgacagcgtggtgcaccacaagctattgcactcagtgagagcccgatttgttcgctttgtgcccctggaatggaatcccagtgggaagattggcatgagagtcgaggtctacggatgttcctataaatcagacgttgctgactttgatggccgaagctcacttctgtacaggttcaatcagaagttgatgagtactctcaaagatgtgatctccctgaagttcaagagcatgcaaggagatggggtcctgttccatggagaaggtcagcgtggagaccacatcaccttggaactccagaaggggaggctcgccctacacctcaatttgggtgacagcaaagcgcggctcagcagcagcttgccctctgccaccctgggcagcctcctggatgaccagcactggcactcggtcctcattgagcgggtgggcaagcaggtgaacttcacggtggacaagcacacacagcacttccgcaccaagggcgagacggatgccttagacattgactatgagcttagttttggaggaattccagtaccaggaaaacctgggacctttttaaagaaaaacttccatggatgcatcgaaaacctttactacaatggagtaaacataattgacctggctaagagacgaaagcatcagatctatactgtgggcaatgtcactttttcctgctccgaaccacagattgtgcccatcacatttgtcaactccagcggcagctatttgctgctgcccggcaccccccaaattgatgggctctcagtgagtttccagtttcgaacatggaacaaggatggtctgcttctgtccacagagctgtctgagggctcgggaaccctgctgctgagcctggagggtggaatcctgagactcgtgattcagaaaatgacagaacgcgtagctgaaatcctcacaggcagcaacttgaatgatggcctgtggcactcggttagcatcaacgccaggaggaaccgcatcacgctcactctggatgatgaagcagcacccccggctccagacagcacttgggtgcagatttattctggaaatagctactattttggagggtgccccgacaatctcaccgattcccaatgtttaaatcccattaaggctttccaaggctgcatgaggctcatctttattgataaccagcccaaggacctcatttcagttcagcaaggttccctggggaattttagtgatttacacattgatctgtgtagcatcaaagacaggtgtttgccaaactactgtgaacatggaggaagctgctcccagtcctggactaccttctattgtaactgcagtgacacaagttacactggtgccacctgccacaactccatctacgagcaatcctgcgaggtgtacaggcaccaggggaatacagccggcttcttctacatcgactcagatggcagcggcccactgggacctctccaggtgtactgcaatatcactgaggacaagatctggacatcagtgcagcacaacaatacagagctgacccgagtgcggggcgctaaccctgagaagccctatgccatggccttggactacgggggcagcatggaacagctggaggccgtgatcgacggctctgagcactgtgagcaggaggtggcctaccactgcaggaggtcccgcctgctcaacacgccggatggaacaccatttacctggtggattgggcggtccaatgaaaggcacccttactggggaggttcccctcctggggtccagcagtgtgagtgtggcctagacgagagctgcctggacattcagcacttttgcaattgcgacgctgacaaggatgaatggacaaatgatactggctttctttccttcaaagaccacttgcctgtcactcagatagttatcactgataccgacagatcaaactcagaagccgcttggagaattggtcccttgcgttgctatggtgaccgacgcttctggaacgccgtctcattttatacagaagcctcttacctccactttcctaccttccatgcggaattcagtgccgatatttccttcttttttaaaaccacagcattatccggagttttcctagaaaatcttggcattaaagacttcattcgactcgaaataagctctccttcagagatcacctttgccatcgatgttgggaatggtcctgtggagcttgtagtccagtctccttctcttctgaatgacaaccaatggcactatgtccgggctgagaggaacctcaaggagacctccctgcaggtggacaaccttccaaggagcaccagggagacgtcggaggagggccattttcgactgcagctgaacagccagttgtttgtagggggaacgtcatccagacagaaaggcttcctaggatgcattcgctccttacacttgaatggacagaaaatggacctggaagagagggcaaaggtcacatctggagtcaggccaggctgccccggccactgcagcagctacggcagcatctgccacaacgggggcaagtgtgtggagaagcacaatggctacctgtgtgattgcaccaattcaccttatgaagggcccttttgcaaaaaagaggtttctgctgtttttgaggctggcacgtcggttacttacatgtttcaagaaccctatcctgtgaccaagaatataagcctctcatcctcagctatttacacagattcagctccatccaaggaaaacattgcacttagctttgtgacaacccaggcacccagtcttttgctctttatcaattcttcttctcaggacttcgtggttgttctgctctgcaagaatggaagcttacaggttcgctatcacctaaacaaggaagaaacccatgtattcaccattgatgcagataactttgctaacagaaggatgcaccacttgaagattaaccgagagggaagagagcttaccattcagatggaccagcaacttcgactcagttataacttctctccggaagtagagttcagggttataaggtcactcaccttgggcaaagtcacagagaatcttggtttggattctgaagttgctaaagcaaatgccatgggttttgctggatgcatgtcttccgtccagtacaaccacatagcaccactgaaggctgccctgcgccatgccactgtcgcgcctgtgactgtccatgggaccttgacggaatccagctgtggcttcatggtggactcagatgtgaatgcagtgaccacggtgcattcttcatcagatccttttgggaagacagatgagcgggaaccactcacaaatgctgttcgaagtgattcggcagtcatcggaggggtgatagcagtggtgatattcatcatcttctgtatcatcggcatcatgacccggttcctctaccagcacaagcagtcacatcgtacgagccagatgaaggagaaggaatatccagaaaatttggacagttccttcagaaatgaaattgacttgcaaaacacagtgagcgagtgtaaacgggaatatttcatctga

SEQ ID NO: 61 - protein, 1175 aa, Homo sapiens
MNADSVVHHKLLHSVRARFVRFVPLEWNPSGKIGMRVEVYGCSYKSDVADFDGRSSLLYRFNQKLMSTLKDVISLKFKSMQGDGVLFHGEGQRGDHITLELQKGRLALHLNLGDSKARLSSSLPSATLGSLLDDQHWHSVLIERVGKQVNFTVDKHTQHFRTKGETDALDIDYELSFGGIPVPGKPGTFLKKNFHGCIENLYYNGVNIIDLAKRRKHQIYTVGNVTFSCSEPQIVPITFVNSSGSYLLLPGTPQIDGLSVSFQFRTWNKDGLLLSTELSEGSGTLLLSLEGGILRLVIQKMTERVAEILTGSNLNDGLWHSVSINARRNRITLTLDDEAAPPAPDSTWVQIYSGNSYYFGGCPDNLTDSQCLNPIKAFQGCMRLIFIDNQPKDLISVQQGSLGNFSDLHIDLCSIKDRCLPNYCEHGGSCSQSWTTFYCNCSDTSYTGATCHNSIYEQSCEVYRHQGNTAGFFYIDSDGSGPLGPLQVYCNITEDKIWTSVQHNNTELTRVRGANPEKPYAMALDYGGSMEQLEAVIDGSEHCEQEVAYHCRRSRLLNTPDGTPFTWWIGRSNERHPYWGGSPPGVQQCECGLDESCLDIQHFCNCDADKDEWTNDTGFLSFKDHLPVTQIVITDTDRSNSEAAWRIGPLRCYGDRRFWNAVSFYTEASYLHFPTFHAEFSADISFFFKTTALSGVFLENLGIKDFIRLEISSPSEITFAIDVGNGPVELVVQSPSLLNDNQWHYVRAERNLKETSLQVDNLPRSTRETSEEGHFRLQLNSQLFVGGTSSRQKGFLGCIRSLHLNGQKMDLEERAKVTSGVRPGCPGHCSSYGSICHNGGKCVEKHNGYLCDCTNSPYEGPFCKKEVSAVFEAGTSVTYMFQEPYPVTKNISLSSSAIYTDSAPSKENIALSFVTTQAPSLLLFINSSSQDFVVVLLCKNGSLQVRYHLNKEETHVFTIDADNFANRRMHHLKINREGRELTIQMDQQLRLSYNFSPEVEFRVIRSLTLGKVTENLGLDSEVAKANAMGFAGCMSSVQYNHIAPLKAALRHATVAPVTVHGTLTESSCGFMVDSDVNAVTTVHSSSDPFGKTDEREPLTNAVRSDSAVIGGVIAVVIFIIFCIIGIMTRFLYQHKQSHRTSQMKEKEYPENLDSSFRNEIDLQNTVSECKREYFI

SEQ ID NO: 62 - DNA, 4869 bp, Homo sapiens
attgggtttggatttgcaccgttaaggaggggggaagagaaggaagaggcgggcgaggaaggcgagtccagctagcggctgttgcggggaccgtagccccagctgcagctccgaagaatcccccgccacggtttcggtggagcgtctgggcacgggatggagtgaaagagcgagtgcctctccaagcgggggtgggagggggtcaggctgtgcagaggagagagacagcgagaagaagccgcggctggctactgcgaatttgggattcgattgggagggaccgctcactcgggggaaatggattctttaccacggctgaccagcgttttgactttgctgttctctggcttgtggcatttaggattaacagcgacaaactgtgaggagtagatgcagtaacacatggaaaccgggagtacctgaccttgttcagagcaggtggttaataaatgatggtagttaatttctcaacttctcttcttatggaatgtttcttgctaatagaatctggtctctctccctctgtcctcctatcattatagacaactgtgatgatccactagcatccctgctctctccaatggctttttccagttcctcagacctcactggcactcacagcccagctcaactcaactggagagttggaactggcggttggtccccagcagattccaatgctcaacagtggctccagatggacctgggaaacagagtagagattacagcagtggccacgcagggaagatacggaagctctgactgggtgacgagttacagcctgatgttcagtgacacaggacgcaactggaaacagtacaaacaagaagacagcatctggacctttgcaggaaacatgaatgctgacagcgtggtgcaccacaagctattgcactcagtgagagcccgatttgttcgctttgtgcccctggaatggaatcccagtgggaagattggcatgagagtcgaggtctacggatgttcctataaatcagacgttgctgactttgatggccgaagctcacttctgtacaggttcaatcagaagttgatgagtactctcaaagatgtgatctccctgaagttcaagagcatgcaaggagatggggtcctgttccatggagaaggtcagcgtggagaccacatcaccttggaactccagaaggggaggctcgccctacacctcaatttgggtgacagcaaagcgcggctcagcagcagcttgccctctgccaccctgggcagcctcctggatgaccagcactggcactcggtcctcattgagcgggtgggcaagcaggtgaacttcacggtggacaagcacacacagcacttccgcaccaagggcgagacggatgccttagacattgactatgagcttagttttggaggaattccagtaccaggaaaacctgggacctttttaaagaaaaacttccatggatgcatcgaaaacctttactacaatggagtaaacataattgacctggctaagagacgaaagcatcagatctatactgtgggcaatgtcactttttcctgctccgaaccacagattgtgcccatcacatttgtcaactccagcggcagctatttgctgctgcccggcaccccccaaattgatgggctctcagtgagtttccagtttcgaacatggaacaaggatggtctgcttctgtccacagagctgtctgagggctcgggaaccctgctgctgagcctggagggtggaatcctgagactcgtgattcagaaaatgacagaacgcgtagctgaaatcctcacaggcagcaacttgaatgatggcctgtggcactcggttagcatcaacgccaggaggaaccgcatcacgctcactctggatgatgaagcagcacccccggctccagacagcacttgggtgcagatttattctggaaatagctactattttggagggtgccccgacaatctcaccgattcccaatgtttaaatcccattaaggctttccaaggctgcatgaggctcatctttattgataaccagcccaaggacctcatttcagttcagcaaggttccctggggaattttagtgatttacacattgatctgtgtagcatcaaagacaggtgtttgccaaactactgtgaacatggaggaagctgctcccagtcctggactaccttctattgtaactgcagtgacacaagttacactggtgccacctgccacaactccatctacgagcaatcctgcgaggtgtacaggcaccaggggaatacagccggcttcttctacatcgactcagatggcagcggcccactgggacctctccaggtgtactgcaatatcactgaggacaagatctggacatcagtgcagcacaacaatacagagctgacccgagtgcggggcgctaaccctgagaagccctatgccatggccttggactacgggggcagcatggaacagctggaggccgtgatcgacggctctgagcactgtgagcaggaggtggcctaccactgcaggaggtcccgcctgctcaacacgccggatggaacaccatttacctggtggattgggcggtccaatgaaaggcacccttactggggaggttcccctcctggggtccagcagtgtgagtgtggcctagacgagagctgcctggacattcagcacttttgcaattgcgacgctgacaaggatgaatggacaaatgatactggctttctttccttcaaagaccacttgcctgtcactcagatagttatcactgataccgacagatcaaactcagaagccgcttggagaattggtcccttgcgttgctatggtgaccgacgcttctggaacgccgtctcattttatacagaagcctcttacctccactttcctaccttccatgcggaattcagtgccgatatttccttcttttttaaaaccacagcattatccggagttttcctagaaaatcttggcattaaagacttcattcgactcgaaataagctctccttcagagatcacctttgccatcgatgttgggaatggtcctgtggagcttgtagtccagtctccttctcttctgaatgacaaccaatggcactatgtccgggctgagaggaacctcaaggagacctccctgcaggtggacaaccttccaaggagcaccagggagacgtcggaggagggccattttcgactgcagctgaacagccagttgtttgtagggggaacgtcatccagacagaaaggcttcctaggatgcattcgctccttacacttgaatggacagaaaatggacctggaagagagggcaaaggtcacatctggagtcaggccaggctgccccggccactgcagcagctacggcagcatctgccacaacgggggcaagtgtgtggagaagcacaatggctacctgtgtgattgcaccaattcaccttatgaagggcccttttgcaaaaaagaggtttctgctgtttttgaggctggcacgtcggttacttacatgtttcaagaaccctatcctgtgaccaagaatataagcctctcatcctcagctatttacacagattcagctccatccaaggaaaacattgcacttagctttgtgacaacccaggcacccagtcttttgctctttatcaattcttcttctcaggacttcgtggttgttctgctctgcaagaatggaagcttacaggttcgctatcacctaaacaaggaagaaacccatgtattcaccattgatgcagataactttgctaacagaaggatgcaccacttgaagattaaccgagagggaagagagcttaccattcagatggaccagcaacttcgactcagttataacttctctccggaagtagagttcagggttataaggtcactcaccttgggcaaagtcacagagaatcttggtttggattctgaagttgctaaagcaaatgccatgggttttgctggatgcatgtcttccgtccagtacaaccacatagcaccactgaaggctgccctgcgccatgccactgtcgcgcctgtgactgtccatgggaccttgacggaatccagctgtggcttcatggtggactcagatgtgaatgcagtgaccacggtgcattcttcatcagatccttttgggaagacagatgagcgggaaccactcacaaatgctgttcgaagtgattcggcagtcatcggaggggtgatagcagtggtgatattcatcatcttctgtatcatcggcatcatgacccggttcctctaccagcacaagcagtcacatcgtacgagccagatgaaggagaaggaatatccagaaaatttggacagttccttcagaaatgaaattgacttgcaaaacacagtgagcgagtgtaaacgggaatatttcatctgagaaactgcagggttcctactactcttttttcttgttgttcaattatctcctccccctcttctctcctgtcttttgatttggtcattctctttattttctgcttgccatgtcttttctggaacatacttgcatccaccacagcatcaattcccttgatccagcccaagagaccaggcagccatggccactgccttcctctctgatgaacctatcgggtgaaaacgaccactcaagagactgacttcgccattcaagacaaggaagagacacatgtgtgcactcctgcatgttcagttctgtacttccagtttctaaaatgcactgttcagttttccaaccacttggtggttcaggcttgctttgaacctgagctcttaggcacatgacggtcattcctgacatcctccccagctcaagtctattcttaccatagaacccagggcagggagagaagaacctagaggcctggtttgctttggtggcat

SEQ ID NO: 63 - DNA, 1404 bp, Homo sapiens
  CDS (1)...(1404)
atggtcctggctttccagttagtctccttcacctacatctggatcatattgaaaccaaatgtttgtgctgcttctaacatcaagatgacacaccagcggtgctcctcttcaatgaaacaaacctgcaaacaagaaactagaatgaagaaagatgacagtaccaaagcgcggcctcagaaatatgagcaacttctccatatagaggacaacgatttcgcaatgagacctggatttggagggtctccagtgccagtaggtatagatgtccatgttgaaagcattgacagcatttcagagactaacatggactttacaatgactttttatctcaggcattactggaaagacgagaggctctcctttcctagcacagcaaacaaaagcatgacatttgatcatagattgaccagaaagatctgggtgcctgatatcttttttgtccactctaaaagatccttcatccatgatacaactatggagaatatcatgctgcgcgtacaccctgatggaaacgtcctcctaagtctcaggataacggtttcggccatgtgctttatggatttcagcaggtttcctcttgacactcaaaattgttctcttgaactggaaagctatgcctacaatgaggatgacctaatgctatactggaaacacggaaacaagtccttaaatactgaagaacatatgtccctttctcagttcttcattgaagacttcagtgcatctagtggattagctttctatagcagcacaggttggtacaataggcttttcatcaactttgtgctaaggaggcatgttttcttctttgtgctgcaaacctatttcccagccatattgatggtgatgctttcatgggtttcattttggattgaccgaagagctgttcctgcaagagtttccctgggaatcaccacagtgctgaccatgtccacaatcatcactgctgtgagcgcctccatgccccaggtgtcctacctcaaggctgtggatgtgtacctgtgggtcagctccctctttgtgttcctgtcagtcattgagtatgcagctgtgaactacctcaccacagtggaagagcggaaacaattcaagaagacaggaaagatttctaggatgtacaatattgatgcagttcaagctatggcctttgatggttgttaccatgacagcgagattgacatggaccagacttccctctctctaaactcagaagacttcatgagaagaaaatcgatatgcagccccagcaccgattcatctcggataaagagaagaaaatccctaggaggacatgttggtagaatcattctggaaaacaaccatgtcattgacacctattctaggattttattccccattgtgtatattttatttaatttgttttactggggtgtatatgtatga

SEQ ID NO: 64 - protein, 467 aa, Homo sapiens
MVLAFQLVSFTYIWIILKPNVCAASNIKMTHQRCSSSMKQTCKQETRMKKDDSTKARPQKYEQLLHIEDNDFAMRPGFGGSPVPVGIDVHVESIDSISETNMDFTMTFYLRHYWKDERLSFPSTANKSMTFDHRLTRKIWVPDIFFVHSKRSFIHDTTMENIMLRVHPDGNVLLSLRITVSAMCFMDFSRFPLDTQNCSLELESYAYNEDDLMLYWKHGNKSLNTEEHMSLSQFFIEDFSASSGLAFYSSTGWYNRLFINFVLRRHVFFFVLQTYFPAILMVMLSWVSFWIDRRAVPARVSLGITTVLTMSTIITAVSASMPQVSYLKAVDVYLWVSSLFVFLSVIEYAAVNYLTTVEERKQFKKTGKISRMYNIDAVQAMAFDGCYHDSEIDMDQTSLSLNSEDFMRRKSICSPSTDSSRIKRRKSLGGHVGRIILENNHVIDTYSRILFPIVYILFNLFYWGVYV

SEQ ID NO: 65 - DNA, 1179 bp, Homo sapiens
  CDS (1)...(1179)
atggtcctggctttccagttagtctccttcacctacatctggatcatattgaaaccaaatgtttgtgctgcttctaacatcaagatgacacaccagcggtgctcctcttcaatgaaacaaacctgcaaacaagaaactagaatgaagaaagatgacagtaccaaagcgcggcctcagaaatatgagcaacttctccatatagaggacaacgatttcgcaatgagacctggatttggagggtctccagtgccagtaggtatagatgtccatgttgaaagcattgacagcatttcagagactaacatggactttacaatgactttttatctcaggcattactggaaagacgagaggctctcctttcctagcacagcaaacaaaagcatgacatttgatcatagattgaccagaaagatctgggtgcctgatatcttttttgtccactctaaaagatccttcatccatgatacaactatggagaatatcatgctgcgcgtacaccctgatggaaacgtcctcctaagtctcaggataacggtttcggccatgtgctttatggatttcagcaggtttcctcttgacactcaaaattgttctcttgaactggaaagctatgcctacaatgaggatgacctaatgctatactggaaacacggaaacaagtccttaaatactgaagaacatatgtccctttctcagttcttcattgaagacttcagtgcatctagtggattagctttctatagcagcacaggttggtacaataggcttttcatcaactttgtgctaaggaggcatgttttcttctttgtgctgcaaacctatttcccagccatattgatggtgatgctttcatgggtttcattttggattgaccgaagagctgttcctgcaagagtttccctgggaatcaccacagtgctgaccatgtccacaatcatcactgctgtgagcgcctccatgccccaggtgtcctacctcaaggctgtggatgtgtacctgtgggtcagctccctctttgtgttcctgtcagtcattgagtatgcagctgtgaactacctcaccacagtggaagagcggaaacaattcaagaagacaggaaaggtacagccttgctctgactatcagatcccttggggaatgtggaaaagactacccttatctattgccctctcttga

SEQ ID NO: 66 - protein, 392 aa, Homo sapiens
MVLAFQLVSFTYIWIILKPNVCAASNIKMTHQRCSSSMKQTCKQETRMKKDDSTKARPQKYEQLLHIEDNDFAMRPGFGGSPVPVGIDVHVESIDSISETNMDFTMTFYLRHYWKDERLSFPSTANKSMTFDHRLTRKIWVPDIFFVHSKRSFIHDTTMENIMLRVHPDGNVLLSLRITVSAMCFMDFSRFPLDTQNCSLELESYAYNEDDLMLYWKHGNKSLNTEEHMSLSQFFIEDFSASSGLAFYSSTGWYNRLFINFVLRRHVFFFVLQTYFPAILMVMLSWVSFWIDRRAVPARVSLGITTVLTMSTIITAVSASMPQVSYLKAVDVYLWVSSLFVFLSVIEYAAVNYLTTVEERKQFKKTGKVQPCSDYQIPWGMWKRLPLSIALS

SEQ ID NO: 67 - DNA, 543 bp, Homo sapiens
  CDS (1)...(543)
atggtcctggctttccagttagtctccttcacctacatctggatcatattgaaaccaaatgtttgtgctgcttctaacatcaagatgacacaccagcggtgctcctcttcaatgaaacaaacctgcaaacaagaaactagaatgaagaaagatgacagtaccaaagcgcggcctcagaaatatgagcaacttctccatatagaggacaacgatttcgcaatgagacctggatttggagggtctccagtgccagtaggtatagatgtccatgttgaaagcattgacagcatttcagagactaacatggactttacaatgactttttatctcaggcattactggaaagacgagaggctctcctttcctagcacagcaaacaaaagcatgacatttgatcatagattgaccagaaagatctgggtgcctgatatcttttttgtccactctaaaagatccttcatccatgatacaactatggagaatatcatgctgcgcgtacaccctgatggaaacgtcctcctaagtctcagatgcctacaatga

SEQ ID NO: 68 - protein, 180 aa, Homo sapiens
MVLAFQLVSFTYIWIILKPNVCAASNIKMTHQRCSSSMKQTCKQETRMKKDDSTKARPQKYEQLLHIEDNDFAMRPGFGGSPVPVGIDVHVESIDSISETNMDFTMTFYLRHYWKDERLSFPSTANKSMTFDHRLTRKIWVPDIFFVHSKRSFIHDTTMENIMLRVHPDGNVLLSLRCLQ

SEQ ID NO: 69 - DNA, 1263 bp, Homo sapiens
  CDS (1)...(1263)
atgaagaaagatgacagtaccaaagcgcggcctcagaaatatgagcaacttctccatatagaggacaacgatttcgcaatgagacctggatttggagggtctccagtgccagtaggtatagatgtccatgttgaaagcattgacagcatttcagagactaacatggactttacaatgactttttatctcaggcattactggaaagacgagaggctctcctttcctagcacagcaaacaaaagcatgacatttgatcatagattgaccagaaagatctgggtgcctgatatcttttttgtccactctaaaagatccttcatccatgatacaactatggagaatatcatgctgcgcgtacaccctgatggaaacgtcctcctaagtctcaggataacggtttcggccatgtgctttatggatttcagcaggtttcctcttgacactcaaaattgttctcttgaactggaaagctatgcctacaatgaggatgacctaatgctatactggaaacacggaaacaagtccttaaatactgaagaacatatgtccctttctcagttcttcattgaagacttcagtgcatctagtggattagctttctatagcagcacaggttggtacaataggcttttcatcaactttgtgctaaggaggcatgttttcttctttgtgctgcaaacctatttcccagccatattgatggtgatgctttcatgggtttcattttggattgaccgaagagctgttcctgcaagagtttccctgggaatcaccacagtgctgaccatgtccacaatcatcactgctgtgagcgcctccatgccccaggtgtcctacctcaaggctgtggatgtgtacctgtgggtcagctccctctttgtgttcctgtcagtcattgagtatgcagctgtgaactacctcaccacagtggaagagcggaaacaattcaagaagacaggaaagatttctaggatgtacaatattgatgcagttcaagctatggcctttgatggttgttaccatgacagcgagattgacatggaccagacttccctctctctaaactcagaagacttcatgagaagaaaatcgatatgcagccccagcaccgattcatctcggataaagagaagaaaatccctaggaggacatgttggtagaatcattctggaaaacaaccatgtcattgacacctattctaggattttattccccattgtgtatattttatttaatttgttttactggggtgtatatgtatga

SEQ ID NO: 70 - protein, 420 aa, Homo sapiens
MKKDDSTKARPQKYEQLLHIEDNDFAMRPGFGGSPVPVGIDVHVESIDSISETNMDFTMTFYLRHYWKDERLSFPSTANKSMTFDHRLTRKIWVPDIFFVHSKRSFIHDTTMENIMLRVHPDGNVLLSLRITVSAMCFMDFSRFPLDTQNCSLELESYAYNEDDLMLYWKHGNKSLNTEEHMSLSQFFIEDFSASSGLAFYSSTGWYNRLFINFVLRRHVFFFVLQTYFPAILMVMLSWVSFWIDRRAVPARVSLGITTVLTMSTIITAVSASMPQVSYLKAVDVYLWVSSLFVFLSVIEYAAVNYLTTVEERKQFKKTGKISRMYNIDAVQAMAFDGCYHDSEIDMDQTSLSLNSEDFMRRKSICSPSTDSSRIKRRKSLGGHVGRIILENNHVIDTYSRILFPIVYILFNLFYWGVYV

SEQ ID NO: 71 - DNA, 1038 bp, Homo sapiens
  CDS (1)...(1038)
atgaagaaagatgacagtaccaaagcgcggcctcagaaatatgagcaacttctccatatagaggacaacgatttcgcaatgagacctggatttggagggtctccagtgccagtaggtatagatgtccatgttgaaagcattgacagcatttcagagactaacatggactttacaatgactttttatctcaggcattactggaaagacgagaggctctcctttcctagcacagcaaacaaaagcatgacatttgatcatagattgaccagaaagatctgggtgcctgatatcttttttgtccactctaaaagatccttcatccatgatacaactatggagaatatcatgctgcgcgtacaccctgatggaaacgtcctcctaagtctcaggataacggtttcggccatgtgctttatggatttcagcaggtttcctcttgacactcaaaattgttctcttgaactggaaagctatgcctacaatgaggatgacctaatgctatactggaaacacggaaacaagtccttaaatactgaagaacatatgtccctttctcagttcttcattgaagacttcagtgcatctagtggattagctttctatagcagcacaggttggtacaataggcttttcatcaactttgtgctaaggaggcatgttttcttctttgtgctgcaaacctatttcccagccatattgatggtgatgctttcatgggtttcattttggattgaccgaagagctgttcctgcaagagtttccctgggaatcaccacagtgctgaccatgtccacaatcatcactgctgtgagcgcctccatgccccaggtgtcctacctcaaggctgtggatgtgtacctgtgggtcagctccctctttgtgttcctgtcagtcattgagtatgcagctgtgaactacctcaccacagtggaagagcggaaacaattcaagaagacaggaaaggtacagccttgctctgactatcagatcccttggggaatgtggaaaagactacccttatctattgccctctcttga

SEQ ID NO: 72 - protein, 345 aa, Homo sapiens
MKKDDSTKARPQKYEQLLHIEDNDFAMRPGFGGSPVPVGIDVHVESIDSISETNMDFTMTFYLRHYWKDERLSFPSTANKSMTFDHRLTRKIWVPDIFFVHSKRSFIHDTTMENIMLRVHPDGNVLLSLRITVSAMCFMDFSRFPLDTQNCSLELESYAYNEDDLMLYWKHGNKSLNTEEHMSLSQFFIEDFSASSGLAFYSSTGWYNRLFINFVLRRHVFFFVLQTYFPAILMVMLSWVSFWIDRRAVPARVSLGITTVLTMSTIITAVSASMPQVSYLKAVDVYLWVSSLFVFLSVIEYAAVNYLTTVEERKQFKKTGKVQPCSDYQIPWGMWKRLPLSIALS

SEQ ID NO: 73 - DNA, 402 bp, Homo sapiens
  CDS (1)...(402)
atgaagaaagatgacagtaccaaagcgcggcctcagaaatatgagcaacttctccatatagaggacaacgatttcgcaatgagacctggatttggagggtctccagtgccagtaggtatagatgtccatgttgaaagcattgacagcatttcagagactaacatggactttacaatgactttttatctcaggcattactggaaagacgagaggctctcctttcctagcacagcaaacaaaagcatgacatttgatcatagattgaccagaaagatctgggtgcctgatatcttttttgtccactctaaaagatccttcatccatgatacaactatggagaatatcatgctgcgcgtacaccctgatggaaacgtcctcctaagtctcagatgcctacaatga

SEQ ID NO: 74 - protein, 133 aa, Homo sapiens
MKKDDSTKARPQKYEQLLHIEDNDFAMRPGFGGSPVPVGIDVHVESIDSISETNMDFTMTFYLRHYWKDERLSFPSTANKSMTFDHRLTRKIWVPDIFFVHSKRSFIHDTTMENIMLRVHPDGNVLLSLRCLQ

SEQ ID NO: 75 - DNA, 1542 bp, Homo sapiens
  CDS (1)...(1542)
atgtgcttccggacaaagctctcagtatcctgggtgccattgtttcttctactcagccgtgttttttctactgagacagacaaaccctcagcccaggacagcagaagccgtgggagttcaggccaaccggcagacctgctacaggttctctctgctggtgaccacccaccccacaaccactcaagaagcctcatcaaaacattgttggagaaaactgggtgcccacggaggagaaacggaatgcaaggagattgcaatctgtgctttgaaccagatgcactattactaatagctggaggaaattttgaagatcagcttagagaagaagtggtccagagagtttctcttctccttctctattacattattcatcaggaagagatctgttcttcaaagctcaacatgagtaataaagagtataaattttacctacacagcctactgagcctcaggcaggatgaagattcctctttcctttcacagaatgagacagaagatatcttggctttcaccaggcagtactttgacacttctcaaagccagtgtatggaaaccaaaacgctgcagaaaaaatctggaatagtgagcagtgaaggtgctaatgaaagtacgcttcctcagttggcagccatgatcattactttgtccctccagggtgtttgtctgggacaaggaaacttgccttccccagactactttacagaatatattttcagttccttgaatcgtacgaataccctccgcctatcagaactagmccaactcctcaacactctctggaccagaagtacttgtatcaaaaatgagaaaatccatcaatttcaaaggaaccaaaccaacataataacccatgatcaggactattctaatttctcttcatccatggaaaaagagtctgaggatggtccagtttcctgggatcagacctgcttctctgctaggcagctggtggagatatttctacagaagggcctctcactcatttctaaggaggactttaagcaaatgagtccagggatcatccagcagctcctcagctgctcctgccacttacccaaggaccaacaagcaaagctgccacctaccactctggagaaatacggctacagcacggtggctgtcacccttctcacactgggctccatgctggggacagcgctggtccttttccatagctgtgaggagaactacaggcttatcttacagctgtttgtgggcttggccgtcgggacactgtctggggacgctctgctccaccttatccctcaggttcttggtttacataagcaggaagccccagaatttgggcatttccatgaaagcaaaggtcatatttggaaactgatgggattaattggaggcatccatggatttttcttgatagaaaaatgttttattcttcttgtatcaccaaatgacaagggcctgtcattggttaatgggcacgtgggtcattcccaccatcttgcactcaactctgaattaagtgaccaggcaggcagaggcaaatctgcttcaactatccagttggtaggttcctga

SEQ ID NO: 76 - protein, 513 aa, Homo sapiens
  VARIANT (1)...(513): Xaa = Any Amino Acid
MCFRTKLSVSWVPLFLLLSRVFSTETDKPSAQDSRSRGSSGQPADLLQVLSAGDHPPHNHSRSLIKTLLEKTGCPRRRNGMQGDCNLCFEPDALLLIAGGNFEDQLREEVVQRVSLLLLYYIIHQEEICSSKLNMSNKEYKFYLHSLLSLRQDEDSSFLSQNETEDILAFTRQYFDTSQSQCMETKTLQKKSGIVSSEGANESTLPQLAAMIITLSLQGVCLGQGNLPSPDYFTEYIFSSLNRTNTLRLSELXQLLNTLWTRSTCIKNEKIHQFQRNQTNIITHDQDYSNFSSSMEKESEDGPVSWDQTCFSARQLVEIFLQKGLSLISKEDFKQMSPGIIQQLLSCSCHLPKDQQAKLPPTTLEKYGYSTVAVTLLTLGSMLGTALVLFHSCEENYRLILQLFVGLAVGTLSGDALLHLIPQVLGLHKQEAPEFGHFHESKGHIWKLMGLIGGIHGFFLIEKCFILLVSPNDKGLSLVNGHVGHSHHLALNSELSDQAGRGKSASTIQLVGS

SEQ ID NO: 77 - DNA, 2073 bp, Homo sapiens
  CDS (1)...(2073)
atgtgcttccggacaaagctctcagtatcctgggtgccattgtttcttctactcagccgtgttttttctactgagacagacaaaccctcagcccaggacagcagaagccgtgggagttcaggccaaccggcagacctgctacaggttctctctgctggtgaccacccaccccacaaccactcaagaagcctcatcaaaacattgttggagaaaactgggtgcccacggaggagaaacggaatgcaaggagattgcaatctgtgctttgaaccagatgcactattactaatagctggaggaaattttgaagatcagcttagagaagaagtggtccagagagtttctcttctccttctctattacattattcatcaggaagagatctgttcttcaaagctcaacatgagtaataaagagtataaattttacctacacagcctactgagcctcaggcaggatgaagattcctctttcctttcacagaatgagacagaagatatcttggctttcaccaggcagtactttgacacttctcaaagccagtgtatggaaaccaaaacgctgcagaaaaaatctggaatagtgagcagtgaaggtgctaatgaaagtacgcttcctcagttggcagccatgatcattactttgtccctccagggtgtttgtctgggacaaggaaacttgccttccccagactactttacagaatatattttcagttccttgaatcgtacgaataccctccgcctatcagaactagmccaactcctcaacactctctggaccagaagtacttgtatcaaaaatgagaaaatccatcaatttcaaaggaaccaaaccaacataataacccatgatcaggactattctaatttctcttcatccatggaaaaagagtctgaggatggtccagtttcctgggatcagacctgcttctctgctaggcagctggtggagatatttctacagaagggcctctcactcatttctaaggaggactttaagcaaatgagtccagggatcatccagcagctcctcagctgctcctgccacttacccaaggaccaacaagcaaagctgccacctaccactctggagaaatacggctacagcacggtggctgtcacccttctcacactgggctccatgctggggacagcgctggtccttttccatagctgtgaggagaactacaggcttatcttacagctgtttgtgggcttggccgtcgggacactgtctggggacgctctgctccaccttatccctcaggttcttggtttacataagcaggaagccccagaatttgggcatttccatgaaagcaaaggtcatatttggaaactgatgggattaattggaggcatccatggatttttcttgatagaaaaatgttttattcttcttgtatcaccaaatgacaagggcctgtcattggttaatgggcacgtgggtcattcccaccatcttgcactcaactctgaattaagtgaccaggcaggcagaggcaaatctgcttcaactatccagttgaaaagcccagaagattcacaggcagctgaaatgcctataggcagtatgacagcctccaacagaaaatgtaaagccattagcttgttagcaatcatgattctggttggggacagcctgcataattttgcagatggcctagccataggagcagccttctcatcatcatccgagtcaggagtgaccactacgattgctatcttgtgtcatgaaatcccacatgaaatgggagactttgccgtgctcttaagctctggactttctatgaagactgccatcctgatgaattttataagctccctaactgccttcatgggattatacattggcctttccgtgtcagctgatccatgtgttcaagactggatcttcacagtcactgctgggatgttcttatatttatccttggttgaaatgcttcctgaaatgactcatgttcaaacacaacgaccctggatgatgtttctcctgcaaaactttggattgatcctaggttggctttctctcctgctcttggctatatatgagcaaaatattaaaatataa

SEQ ID NO: 78 - protein, 690 aa, Homo sapiens
  VARIANT (1)...(690): Xaa = Any Amino Acid
MCFRTKLSVSWVPLFLLLSRVFSTETDKPSAQDSRSRGSSGQPADLLQVLSAGDHPPHNHSRSLIKTLLEKTGCPRRRNGMQGDCNLCFEPDALLLIAGGNFEDQLREEVVQRVSLLLLYYIIHQEEICSSKLNMSNKEYKFYLHSLLSLRQDEDSSFLSQNETEDILAFTRQYFDTSQSQCMETKTLQKKSGIVSSEGANESTLPQLAAMIITLSLQGVCLGQGNLPSPDYFTEYIFSSLNRTNTLRLSELXQLLNTLWTRSTCIKNEKIHQFQRNQTNIITHDQDYSNFSSSMEKESEDGPVSWDQTCFSARQLVEIFLQKGLSLISKEDFKQMSPGIIQQLLSCSCHLPKDQQAKLPPTTLEKYGYSTVAVTLLTLGSMLGTALVLFHSCEENYRLILQLFVGLAVGTLSGDALLHLIPQVLGLHKQEAPEFGHFHESKGHIWKLMGLIGGIHGFFLIEKCFILLVSPNDKGLSLVNGHVGHSHHLALNSELSDQAGRGKSASTIQLKSPEDSQAAEMPIGSMTASNRKCKAISLLAIMILVGDSLHNFADGLAIGAAFSSSSESGVTTTIAILCHEIPHEMGDFAVLLSSGLSMKTAILMNFISSLTAFMGLYIGLSVSADPCVQDWIFTVTAGMFLYLSLVEMLPEMTHVQTQRPWMMFLLQNFGLILGWLSLLLLAIYEQNIKI

SEQ ID NO: 79 - DNA, 1434 bp, Homo sapiens
  CDS (1)...(1434)
atgtgcttccggacaaagctctcagtatcctgggtgccattgtttcttctactcagccgtgttttttctactgagacagacaaaccctcagcccaggacagcagaagccgtgggagttcaggccaaccggcagacctgctacaggttctctctgctggtgaccacccaccccacaaccactcaagaagcctcatcaaaacattgttggagaaaactgggtgcccacggaggagaaacggaatgcaaggagattgcaatctgtgctttgaaccagatgcactattactaatagctggaggaaattttgaagatcagcttagagaagaagtggtccagagagtttctcttctccttctctattacattattcatcaggaagagatctgttcttcaaagctcaacatgagtaataaagagtataaattttacctacacagcctactgagcctcaggcaggatgaagattcctctttcctttcacagaatgagacagaagatatcttggctttcaccaggcagtactttgacacttctcaaagccagtgtatggaaaccaaaacgctgcagaaaaaatctggaatagtgagcagtgaaggtgctaatgaaagtacgcttcctcagttggcagccatgatcattactttgtccctccagggtgtttgtctgggacaaggaaacttgccttccccagactactttacagaatatattttcagttccttgaatcgtacgaataccctccgcctatcagaactagmccaactcctcaacactctctggaccagaagtacttgtatcaaaaatgagaaaatccatcaatttcaaaggaaccaaaccaacataataacccatgatcaggactattctaatttctcttcatccatggaaaaagagtctgaggatggtccagtttcctgggatcagacctgcttctctgctaggcagctggtggagatatttctacagaagggcctctcactcatttctaaggaggactttaagcaaatgagtccagggatcatccagcagctcctcagctgctcctgccacttacccaaggaccaacaagcaaagctgccacctaccactctggagaaatacggctacagcacggtggctgtcacccttctcacactgggctccatgctggggacagcgctggtccttttccatagctgtgaggagaactacaggcttatcttacagctgtttgtgggcttggccgtcgggacactgtctggggacgctctgctccaccttatccctcaggttcttggtttacataagcaggaagccccagaatttgggcatttccatgaaagcaaaggtcatatttggaaactgatgggattaattggaggcatccatggatttttcttgatagaaaaatgttttattcttcttgtatcaccaaatgacaaggtaggttcctga

SEQ ID NO: 80 - protein, 477 aa, Homo sapiens
  VARIANT (1)...(477): Xaa = Any Amino Acid
MCFRTKLSVSWVPLFLLLSRVFSTETDKPSAQDSRSRGSSGQPADLLQVLSAGDHPPHNHSRSLIKTLLEKTGCPRRRNGMQGDCNLCFEPDALLLIAGGNFEDQLREEVVQRVSLLLLYYIIHQEEICSSKLNMSNKEYKFYLHSLLSLRQDEDSSFLSQNETEDILAFTRQYFDTSQSQCMETKTLQKKSGIVSSEGANESTLPQLAAMIITLSLQGVCLGQGNLPSPDYFTEYIFSSLNRTNTLRLSELXQLLNTLWTRSTCIKNEKIHQFQRNQTNIITHDQDYSNFSSSMEKESEDGPVSWDQTCFSARQLVEIFLQKGLSLISKEDFKQMSPGIIQQLLSCSCHLPKDQQAKLPPTTLEKYGYSTVAVTLLTLGSMLGTALVLFHSCEENYRLILQLFVGLAVGTLSGDALLHLIPQVLGLHKQEAPEFGHFHESKGHIWKLMGLIGGIHGFFLIEKCFILLVSPNDKVGS

SEQ ID NO: 81 - DNA, 1965 bp, Homo sapiens
  CDS (1)...(1965)
atgtgcttccggacaaagctctcagtatcctgggtgccattgtttcttctactcagccgtgttttttctactgagacagacaaaccctcagcccaggacagcagaagccgtgggagttcaggccaaccggcagacctgctacaggttctctctgctggtgaccacccaccccacaaccactcaagaagcctcatcaaaacattgttggagaaaactgggtgcccacggaggagaaacggaatgcaaggagattgcaatctgtgctttgaaccagatgcactattactaatagctggaggaaattttgaagatcagcttagagaagaagtggtccagagagtttctcttctccttctctattacattattcatcaggaagagatctgttcttcaaagctcaacatgagtaataaagagtataaattttacctacacagcctactgagcctcaggcaggatgaagattcctctttcctttcacagaatgagacagaagatatcttggctttcaccaggcagtactttgacacttctcaaagccagtgtatggaaaccaaaacgctgcagaaaaaatctggaatagtgagcagtgaaggtgctaatgaaagtacgcttcctcagttggcagccatgatcattactttgtccctccagggtgtttgtctgggacaaggaaacttgccttccccagactactttacagaatatattttcagttccttgaatcgtacgaataccctccgcctatcagaactagmccaactcctcaacactctctggaccagaagtacttgtatcaaaaatgagaaaatccatcaatttcaaaggaaccaaaccaacataataacccatgatcaggactattctaatttctcttcatccatggaaaaagagtctgaggatggtccagtttcctgggatcagacctgcttctctgctaggcagctggtggagatatttctacagaagggcctctcactcatttctaaggaggactttaagcaaatgagtccagggatcatccagcagctcctcagctgctcctgccacttacccaaggaccaacaagcaaagctgccacctaccactctggagaaatacggctacagcacggtggctgtcacccttctcacactgggctccatgctggggacagcgctggtccttttccatagctgtgaggagaactacaggcttatcttacagctgtttgtgggcttggccgtcgggacactgtctggggacgctctgctccaccttatccctcaggttcttggtttacataagcaggaagccccagaatttgggcatttccatgaaagcaaaggtcatatttggaaactgatgggattaattggaggcatccatggatttttcttgatagaaaaatgttttattcttcttgtatcaccaaatgacaagaaaagcccagaagattcacaggcagctgaaatgcctataggcagtatgacagcctccaacagaaaatgtaaagccattagcttgttagcaatcatgattctggttggggacagcctgcataattttgcagatggcctagccataggagcagccttctcatcatcatccgagtcaggagtgaccactacgattgctatcttgtgtcatgaaatcccacatgaaatgggagactttgccgtgctcttaagctctggactttctatgaagactgccatcctgatgaattttataagctccctaactgccttcatgggattatacattggcctttccgtgtcagctgatccatgtgttcaagactggatcttcacagtcactgctgggatgttcttatatttatccttggttgaaatgcttcctgaaatgactcatgttcaaacacaacgaccctggatgatgtttctcctgcaaaactttggattgatcctaggttggctttctctcctgctcttggctatatatgagcaaaatattaaaatataa

SEQ ID NO: 82 - protein, 654 aa, Homo sapiens
  VARIANT (1)...(654): Xaa = Any Amino Acid
MCFRTKLSVSWVPLFLLLSRVFSTETDKPSAQDSRSRGSSGQPADLLQVLSAGDHPPHNHSRSLIKTLLEKTGCPRRRNGMQGDCNLCFEPDALLLIAGGNFEDQLREEVVQRVSLLLLYYIIHQEEICSSKLNMSNKEYKFYLHSLLSLRQDEDSSFLSQNETEDILAFTRQYFDTSQSQCMETKTLQKKSGIVSSEGANESTLPQLAAMIITLSLQGVCLGQGNLPSPDYFTEYIFSSLNRTNTLRLSELXQLLNTLWTRSTCIKNEKIHQFQRNQTNIITHDQDYSNFSSSMEKESEDGPVSWDQTCFSARQLVEIFLQKGLSLISKEDFKQMSPGIIQQLLSCSCHLPKDQQAKLPPTTLEKYGYSTVAVTLLTLGSMLGTALVLFHSCEENYRLILQLFVGLAVGTLSGDALLHLIPQVLGLHKQEAPEFGHFHESKGHIWKLMGLIGGIHGFFLIEKCFILLVSPNDKKSPEDSQAAEMPIGSMTASNRKCKAISLLAIMILVGDSLHNFADGLAIGAAFSSSSESGVTTTIAILCHEIPHEMGDFAVLLSSGLSMKTAILMNFISSLTAFMGLYIGLSVSADPCVQDWIFTVTAGMFLYLSLVEMLPEMTHVQTQRPWMMFLLQNFGLILGWLSLLLLAIYEQNIKI

SEQ ID NO: 83 - DNA, 1140 bp, Homo sapiens
  CDS (1)...(1140)
atgagtaataaagagtataaattttacctacacagcctactgagcctcaggcaggatgaagattcctctttcctttcacagaatgagacagaagatatcttggctttcaccaggcagtactttgacacttctcaaagccagtgtatggaaaccaaaacgctgcagaaaaaatctggaatagtgagcagtgaaggtgctaatgaaagtacgcttcctcagttggcagccatgatcattactttgtccctccagggtgtttgtctgggacaaggaaacttgccttccccagactactttacagaatatattttcagttccttgaatcgtacgaataccctccgcctatcagaactagmccaactcctcaacactctctggaccagaagtacttgtatcaaaaatgagaaaatccatcaatttcaaaggaaccaaaccaacataataacccatgatcaggactattctaatttctcttcatccatggaaaaagagtctgaggatggtccagtttcctgggatcagacctgcttctctgctaggcagctggtggagatatttctacagaagggcctctcactcatttctaaggaggactttaagcaaatgagtccagggatcatccagcagctcctcagctgctcctgccacttacccaaggaccaacaagcaaagctgccacctaccactctggagaaatacggctacagcacggtggctgtcacccttctcacactgggctccatgctggggacagcgctggtccttttccatagctgtgaggagaactacaggcttatcttacagctgtttgtgggcttggccgtcgggacactgtctggggacgctctgctccaccttatccctcaggttcttggtttacataagcaggaagccccagaatttgggcatttccatgaaagcaaaggtcatatttggaaactgatgggattaattggaggcatccatggatttttcttgatagaaaaatgttttattcttcttgtatcaccaaatgacaagggcctgtcattggttaatgggcacgtgggtcattcccaccatcttgcactcaactctgaattaagtgaccaggcaggcagaggcaaatctgcttcaactatccagttggtaggttcctga

SEQ ID NO: 84 - protein, 379 aa, Homo sapiens
  VARIANT (1)...(379): Xaa = Any Amino Acid
MSNKEYKFYLHSLLSLRQDEDSSFLSQNETEDILAFTRQYFDTSQSQCMETKTLQKKSGIVSSEGANESTLPQLAAMIITLSLQGVCLGQGNLPSPDYFTEYIFSSLNRTNTLRLSELXQLLNTLWTRSTCIKNEKIHQFQRNQTNIITHDQDYSNFSSSMEKESEDGPVSWDQTCFSARQLVEIFLQKGLSLISKEDFKQMSPGIIQQLLSCSCHLPKDQQAKLPPTTLEKYGYSTVAVTLLTLGSMLGTALVLFHSCEENYRLILQLFVGLAVGTLSGDALLHLIPQVLGLHKQEAPEFGHFHESKGHIWKLMGLIGGIHGFFLIEKCFILLVSPNDKGLSLVNGHVGHSHHLALNSELSDQAGRGKSASTIQLVGS

SEQ ID NO: 85 - DNA, 1671 bp, Homo sapiens
  CDS (1)...(1671)
atgagtaataaagagtataaattttacctacacagcctactgagcctcaggcaggatgaagattcctctttcctttcacagaatgagacagaagatatcttggctttcaccaggcagtactttgacacttctcaaagccagtgtatggaaaccaaaacgctgcagaaaaaatctggaatagtgagcagtgaaggtgctaatgaaagtacgcttcctcagttggcagccatgatcattactttgtccctccagggtgtttgtctgggacaaggaaacttgccttccccagactactttacagaatatattttcagttccttgaatcgtacgaataccctccgcctatcagaactagmccaactcctcaacactctctggaccagaagtacttgtatcaaaaatgagaaaatccatcaatttcaaaggaaccaaaccaacataataacccatgatcaggactattctaatttctcttcatccatggaaaaagagtctgaggatggtccagtttcctgggatcagacctgcttctctgctaggcagctggtggagatatttctacagaagggcctctcactcatttctaaggaggactttaagcaaatgagtccagggatcatccagcagctcctcagctgctcctgccacttacccaaggaccaacaagcaaagctgccacctaccactctggagaaatacggctacagcacggtggctgtcacccttctcacactgggctccatgctggggacagcgctggtccttttccatagctgtgaggagaactacaggcttatcttacagctgtttgtgggcttggccgtcgggacactgtctggggacgctctgctccaccttatccctcaggttcttggtttacataagcaggaagccccagaatttgggcatttccatgaaagcaaaggtcatatttggaaactgatgggattaattggaggcatccatggatttttcttgatagaaaaatgttttattcttcttgtatcaccaaatgacaagggcctgtcattggttaatgggcacgtgggtcattcccaccatcttgcactcaactctgaattaagtgaccaggcaggcagaggcaaatctgcttcaactatccagttgaaaagcccagaagattcacaggcagctgaaatgcctataggcagtatgacagcctccaacagaaaatgtaaagccattagcttgttagcaatcatgattctggttggggacagcctgcataattttgcagatggcctagccataggagcagccttctcatcatcatccgagtcaggagtgaccactacgattgctatcttgtgtcatgaaatcccacatgaaatgggagactttgccgtgctcttaagctctggactttctatgaagactgccatcctgatgaattttataagctccctaactgccttcatgggattatacattggcctttccgtgtcagctgatccatgtgttcaagactggatcttcacagtcactgctgggatgttcttatatttatccttggttgaaatgcttcctgaaatgactcatgttcaaacacaacgaccctggatgatgtttctcctgcaaaactttggattgatcctaggttggctttctctcctgctcttggctatatatgagcaaaatattaaaatataa

SEQ ID NO: 86 - protein, 556 aa, Homo sapiens
  VARIANT (1)...(556): Xaa = Any Amino Acid
MSNKEYKFYLHSLLSLRQDEDSSFLSQNETEDILAFTRQYFDTSQSQCMETKTLQKKSGIVSSEGANESTLPQLAAMIITLSLQGVCLGQGNLPSPDYFTEYIFSSLNRTNTLRLSELXQLLNTLWTRSTCIKNEKIHQFQRNQTNIITHDQDYSNFSSSMEKESEDGPVSWDQTCFSARQLVEIFLQKGLSLISKEDFKQMSPGIIQQLLSCSCHLPKDQQAKLPPTTLEKYGYSTVAVTLLTLGSMLGTALVLFHSCEENYRLILQLFVGLAVGTLSGDALLHLIPQVLGLHKQEAPEFGHFHESKGHIWKLMGLIGGIHGFFLIEKCFILLVSPNDKGLSLVNGHVGHSHHLALNSELSDQAGRGKSASTIQLKSPEDSQAAEMPIGSMTASNRKCKAISLLAIMILVGDSLHNFADGLAIGAAFSSSSESGVTTTIAILCHEIPHEMGDFAVLLSSGLSMKTAILMNFISSLTAFMGLYIGLSVSADPCVQDWIFTVTAGMFLYLSLVEMLPEMTHVQTQRPWMMFLLQNFGLILGWLSLLLLAIYEQNIKI

SEQ ID NO: 87 - DNA, 1032 bp, Homo sapiens
  CDS (1)...(1032)
atgagtaataaagagtataaattttacctacacagcctactgagcctcaggcaggatgaagattcctctttcctttcacagaatgagacagaagatatcttggctttcaccaggcagtactttgacacttctcaaagccagtgtatggaaaccaaaacgctgcagaaaaaatctggaatagtgagcagtgaaggtgctaatgaaagtacgcttcctcagttggcagccatgatcattactttgtccctccagggtgtttgtctgggacaaggaaacttgccttccccagactactttacagaatatattttcagttccttgaatcgtacgaataccctccgcctatcagaactagmccaactcctcaacactctctggaccagaagtacttgtatcaaaaatgagaaaatccatcaatttcaaaggaaccaaaccaacataataacccatgatcaggactattctaatttctcttcatccatggaaaaagagtctgaggatggtccagtttcctgggatcagacctgcttctctgctaggcagctggtggagatatttctacagaagggcctctcactcatttctaaggaggactttaagcaaatgagtccagggatcatccagcagctcctcagctgctcctgccacttacccaaggaccaacaagcaaagctgccacctaccactctggagaaatacggctacagcacggtggctgtcacccttctcacactgggctccatgctggggacagcgctggtccttttccatagctgtgaggagaactacaggcttatcttacagctgtttgtgggcttggccgtcgggacactgtctggggacgctctgctccaccttatccctcaggttcttggtttacataagcaggaagccccagaatttgggcatttccatgaaagcaaaggtcatatttggaaactgatgggattaattggaggcatccatggatttttcttgatagaaaaatgttttattcttcttgtatcaccaaatgacaaggtaggttcctga

SEQ ID NO: 88 - protein, 343 aa, Homo sapiens
  VARIANT (1)...(343): Xaa = Any Amino Acid
MSNKEYKFYLHSLLSLRQDEDSSFLSQNETEDILAFTRQYFDTSQSQCMETKTLQKKSGIVSSEGANESTLPQLAAMIITLSLQGVCLGQGNLPSPDYFTEYIFSSLNRTNTLRLSELXQLLNTLWTRSTCIKNEKIHQFQRNQTNIITHDQDYSNFSSSMEKESEDGPVSWDQTCFSARQLVEIFLQKGLSLISKEDFKQMSPGIIQQLLSCSCHLPKDQQAKLPPTTLEKYGYSTVAVTLLTLGSMLGTALVLFHSCEENYRLILQLFVGLAVGTLSGDALLHLIPQVLGLHKQEAPEFGHFHESKGHIWKLMGLIGGIHGFFLIEKCFILLVSPNDKVGS

SEQ ID NO: 89 - DNA, 1563 bp, Homo sapiens
  CDS (1)...(1563)
atgagtaataaagagtataaattttacctacacagcctactgagcctcaggcaggatgaagattcctctttcctttcacagaatgagacagaagatatcttggctttcaccaggcagtactttgacacttctcaaagccagtgtatggaaaccaaaacgctgcagaaaaaatctggaatagtgagcagtgaaggtgctaatgaaagtacgcttcctcagttggcagccatgatcattactttgtccctccagggtgtttgtctgggacaaggaaacttgccttccccagactactttacagaatatattttcagttccttgaatcgtacgaataccctccgcctatcagaactagmccaactcctcaacactctctggaccagaagtacttgtatcaaaaatgagaaaatccatcaatttcaaaggaaccaaaccaacataataacccatgatcaggactattctaatttctcttcatccatggaaaaagagtctgaggatggtccagtttcctgggatcagacctgcttctctgctaggcagctggtggagatatttctacagaagggcctctcactcatttctaaggaggactttaagcaaatgagtccagggatcatccagcagctcctcagctgctcctgccacttacccaaggaccaacaagcaaagctgccacctaccactctggagaaatacggctacagcacggtggctgtcacccttctcacactgggctccatgctggggacagcgctggtccttttccatagctgtgaggagaactacaggcttatcttacagctgtttgtgggcttggccgtcgggacactgtctggggacgctctgctccaccttatccctcaggttcttggtttacataagcaggaagccccagaatttgggcatttccatgaaagcaaaggtcatatttggaaactgatgggattaattggaggcatccatggatttttcttgatagaaaaatgttttattcttcttgtatcaccaaatgacaagaaaagcccagaagattcacaggcagctgaaatgcctataggcagtatgacagcctccaacagaaaatgtaaagccattagcttgttagcaatcatgattctggttggggacagcctgcataattttgcagatggcctagccataggagcagccttctcatcatcatccgagtcaggagtgaccactacgattgctatcttgtgtcatgaaatcccacatgaaatgggagactttgccgtgctcttaagctctggactttctatgaagactgccatcctgatgaattttataagctccctaactgccttcatgggattatacattggcctttccgtgtcagctgatccatgtgttcaagactggatcttcacagtcactgctgggatgttcttatatttatccttggttgaaatgcttcctgaaatgactcatgttcaaacacaacgaccctggatgatgtttctcctgcaaaactttggattgatcctaggttggctttctctcctgctcttggctatatatgagcaaaatattaaaatataa

SEQ ID NO: 90 - protein, 520 aa, Homo sapiens
  VARIANT (1)...(520): Xaa = Any Amino Acid
MSNKEYKFYLHSLLSLRQDEDSSFLSQNETEDILAFTRQYFDTSQSQCMETKTLQKKSGIVSSEGANESTLPQLAAMIITLSLQGVCLGQGNLPSPDYFTEYIFSSLNRTNTLRLSELXQLLNTLWTRSTCIKNEKIHQFQRNQTNIITHDQDYSNFSSSMEKESEDGPVSWDQTCFSARQLVEIFLQKGLSLISKEDFKQMSPGIIQQLLSCSCHLPKDQQAKLPPTTLEKYGYSTVAVTLLTLGSMLGTALVLFHSCEENYRLILQLFVGLAVGTLSGDALLHLIPQVLGLHKQEAPEFGHFHESKGHIWKLMGLIGGIHGFFLIEKCFILLVSPNDKKSPEDSQAAEMPIGSMTASNRKCKAISLLAIMILVGDSLHNFADGLAIGAAFSSSSESGVTTTIAILCHEIPHEMGDFAVLLSSGLSMKTAILMNFISSLTAFMGLYIGLSVSADPCVQDWIFTVTAGMFLYLSLVEMLPEMTHVQTQRPWMMFLLQNFGLILGWLSLLLLAIYEQNIKI

SEQ ID NO: 91 - DNA, 2480 bp, Homo sapiens
ctctctagctcccagtgcacagtcaaagaattttaaaaacagggaactttgtaactgtgaaatactctccaggatttaaaaggctgtggagctccagataaagaatcgtttatctttcttctgaagaaattcctttggttacaagtttaccccataaacggcaacacactcacctccatccaagacagactcaaggtggaggaagcgtggaaatgtgcttccggacaaagctctcagtatcctgggtgccattgtttcttctactcagccgtgttttttctactgagacagacaaaccctcagcccaggacagcagaagccgtgggagttcaggccaaccggcagacctgctacaggttctctctgctggtgaccacccaccccacaaccactcaagaagcctcatcaaaacattgttggagaaaactgggtgcccacggaggagaaacggaatgcaaggagattgcaatctgtgctttgaaccagatgcactattactaatagctggaggaaattttgaagatcagcttagagaagaagtggtccagagagtttctcttctccttctctattacattattcatcaggaagagatctgttcttcaaagctcaacatgagtaataaagagtataaattttacctacacagcctactgagcctcaggcaggatgaagattcctctttcctttcacagaatgagacagaagatatcttggctttcaccaggcagtactttgacacttctcaaagccagtgtatggaaaccaaaacgctgcagaaaaaatctggaatagtgagcagtgaaggtgctaatgaaagtacgcttcctcagttggcagccatgatcattactttgtccctccagggtgtttgtctgggacaaggaaacttgccttccccagactactttacagaatatattttcagttccttgaatcgtacgaataccctccgcctatcagaactagmccaactcctcaacactctctggaccagaagtacttgtatcaaaaatgagaaaatccatcaatttcaaaggaaccaaaccaacataataacccatgatcaggactattctaatttctcttcatccatggaaaaagagtctgaggatggtccagtttcctgggatcagacctgcttctctgctaggcagctggtggagatatttctacagaagggcctctcactcatttctaaggaggactttaagcaaatgagtccagggatcatccagcagctcctcagctgctcctgccacttacccaaggaccaacaagcaaagctgccacctaccactctggagaaatacggctacagcacggtggctgtcacccttctcacactgggctccatgctggggacagcgctggtccttttccatagctgtgaggagaactacaggcttatcttacagctgtttgtgggcttggccgtcgggacactgtctggggacgctctgctccaccttatccctcaggttcttggtttacataagcaggaagccccagaatttgggcatttccatgaaagcaaaggtcatatttggaaactgatgggattaattggaggcatccatggatttttcttgatagaaaaatgttttattcttcttgtatcaccaaatgacaagggcctgtcattggttaatgggcacgtgggtcattcccaccatcttgcactcaactctgaattaagtgaccaggcaggcagaggcaaatctgcttcaactatccagttgaaaagcccagaagattcacaggcagctgaaatgcctataggcagtatgacagcctccaacagaaaatgtaaagccattagcttgttagcaatcatgattctggttggggacagcctgcataattttgcagatggcctagccataggagcagccttctcatcatcatccgagtcaggagtgaccactacgattgctatcttgtgtcatgaaatcccacatgaaatgggagactttgccgtgctcttaagctctggactttctatgaagactgccatcctgatgaattttataagctccctaactgccttcatgggattatacattggcctttccgtgtcagctgatccatgtgttcaagactggatcttcacagtcactgctgggatgttcttatatttatccttggttgaaatgcttcctgaaatgactcatgttcaaacacaacgaccctggatgatgtttctcctgcaaaactttggattgatcctaggttggctttctctcctgctcttggctatatatgagcaaaatattaaaatataagtgaggatcttcaacatctttcaaaaatgcatttatatagtcttactttgtttctttcattgcactctataatgatttttaaattaagaattttttatcttaggcaaagtgtgtctctttcaattcattaacttattaattttataatgcagttttatttttggaaacatataaatatcaagactgtccttaatt

SEQ ID NO: 92 - DNA, 1095 bp, Homo sapiens
  CDS (1)...(1095)
atggagttggaggggcggggtgctggcggtgtggcgggggggccggcggcagggcccgggcggagccccggggagtcggcgctgctggacgggtggctgcagcggggcgtgggccggggggccggcggcggggaggccggggcctgcaggcccccggtacgacaagatccggactccggcccggactacgaggcgctgccggctggagccactgtcaccacgcacatggtggcaggcgccgtggcagggatcctggagcactgcgtgatgtaccccatcgactgcgtcaagacccggatgcagagtctacagcctgacccagctgcccgctatcgcaatgtgttggaggccctctggaggattataagaacggagggcctatggaggcccatgagggggctgaacgtcacagcaacaggcgcagggcctgcccacgccctttattttgcctgctacgaaaagttaaaaaagacattgagtgatgtaatccaccctgggggcaatagccatattgccaatggtgcggccgggtgtgtggcaacattacttcatgatgcagccatgaaccctgcggaagtggtcaagcagaggatgcagatgtacaactcaccataccaccgggtgacagactgtgtacgggcagtgtggcaaaatgaaggggccggggccttttaccgcagctacaccacccagctgaccatgaacgttcctttccaagccattcacttcatgacctatgaattcctgcaggagcactttaacccccagagacggtacaacccaagctcccacgtcctctctggagcttgcgcaggagctgtagctgccgcagccacaaccccactggacgtttgcaaaacactgctcaacacccaggagtccttggctttgaactcacacattacaggacatatcacaggcatggctagtgccttcaggacggtatatcaagtaggtggggtgaccgcctatttccgaggggtgcaggccagagtaatttaccagatcccctccacagccatcgcatggtctgtgtatgagttcttcaaatacctaatcactaaaaggcaagaagagtggagggctggcaagtga

SEQ ID NO: 93 - protein, 364 aa, Homo sapiens
MELEGRGAGGVAGGPAAGPGRSPGESALLDGWLQRGVGRGAGGGEAGACRPPVRQDPDSGPDYEALPAGATVTTHMVAGAVAGILEHCVMYPIDCVKTRMQSLQPDPAARYRNVLEALWRIIRTEGLWRPMRGLNVTATGAGPAHALYFACYEKLKKTLSDVIHPGGNSHIANGAAGCVATLLHDAAMNPAEVVKQRMQMYNSPYHRVTDCVRAVWQNEGAGAFYRSYTTQLTMNVPFQAIHFMTYEFLQEHFNPQRRYNPSSHVLSGACAGAVAAAATTPLDVCKTLLNTQESLALNSHITGHITGMASAFRTVYQVGGVTAYFRGVQARVIYQIPSTAIAWSVYEFFKYLITKRQEEWRAGK

SEQ ID NO: 94 - DNA, 582 bp, Homo sapiens
  CDS (1)...(582)
atggagttggaggggcggggtgctggcggtgtggcgggggggccggcggcagggcccgggcggagccccggggagtcggcgctgctggacgggtggctgcagcggggcgtgggccggggggccggcggcggggaggccggggcctgcaggcccccggtacgacaagatccggactccggcccggactacgaggcgctgccggctggagccactgtcaccacgcacatggtggcaggcgccgtggcagggatcctggagcactgcgtgatgtaccccatcgactgcgtcaagacccggatgcagagtctacagcctgacccagctgcccgctatcgcaatgtgttggaggccctctggaggattataagaacggagggcctatggaggcccatgagggggctgaacgtcacagcaacaggcgcagggcctgcccacgccctttattttgcctgctacgaaaagttaaaaaagacattgagtgatgtaatccaccctgggggcaatagccatattgccaatggtgcggccgggtgtgtggcaacattacttcatgatgcagccatgaaccctgcggaaggctga

SEQ ID NO: 95 - protein, 193 aa, Homo sapiens
MELEGRGAGGVAGGPAAGPGRSPGESALLDGWLQRGVGRGAGGGEAGACRPPVRQDPDSGPDYEALPAGATVTTHMVAGAVAGILEHCVMYPIDCVKTRMQSLQPDPAARYRNVLEALWRIIRTEGLWRPMRGLNVTATGAGPAHALYFACYEKLKKTLSDVIHPGGNSHIANGAAGCVATLLHDAAMNPAEG

SEQ ID NO: 96 - DNA, 693 bp, Homo sapiens
  CDS (1)...(693)
atggagttggaggggcggggtgctggcggtgtggcgggggggccggcggcagggcccgggcggagccccggggagtcggcgctgctggacgggtggctgcagcggggcgtgggccggggggccggcggcggggaggccggggcctgcaggcccccggtacgacaagatccggactccggcccggactacgaggcgctgccggctggagccactgtcaccacgcacatggtggcaggcgccgtggcagggatcctggagcactgcgtgatgtaccccatcgactgcgtcaagacccggatgcagagtctacagcctgacccagctgcccgctatcgcaatgtgttggaggccctctggaggattataagaacggagggcctatggaggcccatgagggggctgaacgtcacagcaacaggcgcagggcctgcccacgccctttattttgcctgctacgaaaagttaaaaaagacattgagtgatgtaatccaccctgggggcaatagccatattgccaatggtgcggccgggtgtgtggcaacattacttcatgatgcagccatgaaccctgcggaaggtaatgattcctcaacctatcactctgtgggcagctgcacctgtatttctttacagtttgcagaagaaagcacatcagttttggtgggaaattctgttaccttgttttaccactag

SEQ ID NO: 97 - protein, 230 aa, Homo sapiens
MELEGRGAGGVAGGPAAGPGRSPGESALLDGWLQRGVGRGAGGGEAGACRPPVRQDPDSGPDYEALPAGATVTTHMVAGAVAGILEHCVMYPIDCVKTRMQSLQPDPAARYRNVLEALWRIIRTEGLWRPMRGLNVTATGAGPAHALYFACYEKLKKTLSDVIHPGGNSHIANGAAGCVATLLHDAAMNPAEGNDSSTYHSVGSCTCISLQFAEESTSVLVGNSVTLFYH

SEQ ID NO: 98 - DNA, 798 bp, Homo sapiens
  CDS (1)...(798)
atgcagagtctacagcctgacccagctgcccgctatcgcaatgtgttggaggccctctggaggattataagaacggagggcctatggaggcccatgagggggctgaacgtcacagcaacaggcgcagggcctgcccacgccctttattttgcctgctacgaaaagttaaaaaagacattgagtgatgtaatccaccctgggggcaatagccatattgccaatggtgcggccgggtgtgtggcaacattacttcatgatgcagccatgaaccctgcggaagtggtcaagcagaggatgcagatgtacaactcaccataccaccgggtgacagactgtgtacgggcagtgtggcaaaatgaaggggccggggccttttaccgcagctacaccacccagctgaccatgaacgttcctttccaagccattcacttcatgacctatgaattcctgcaggagcactttaacccccagagacggtacaacccaagctcccacgtcctctctggagcttgcgcaggagctgtagctgccgcagccacaaccccactggacgtttgcaaaacactgctcaacacccaggagtccttggctttgaactcacacattacaggacatatcacaggcatggctagtgccttcaggacggtatatcaagtaggtggggtgaccgcctatttccgaggggtgcaggccagagtaatttaccagatcccctccacagccatcgcatggtctgtgtatgagttcttcaaatacctaatcactaaaaggcaagaagagtggagggctggcaagtga

SEQ ID NO: 99 - protein, 265 aa, Homo sapiens
MQSLQPDPAARYRNVLEALWRIIRTEGLWRPMRGLNVTATGAGPAHALYFACYEKLKKTLSDVIHPGGNSHIANGAAGCVATLLHDAAMNPAEVVKQRMQMYNSPYHRVTDCVRAVWQNEGAGAFYRSYTTQLTMNVPFQAIHFMTYEFLQEHFNPQRRYNPSSHVLSGACAGAVAAAATTPLDVCKTLLNTQESLALNSHITGHITGMASAFRTVYQVGGVTAYFRGVQARVIYQIPSTAIAWSVYEFFKYLITKRQEEWRAGK

SEQ ID NO: 100 - DNA, 285 bp, Homo sapiens
  CDS (1)...(285)
atgcagagtctacagcctgacccagctgcccgctatcgcaatgtgttggaggccctctggaggattataagaacggagggcctatggaggcccatgagggggctgaacgtcacagcaacaggcgcagggcctgcccacgccctttattttgcctgctacgaaaagttaaaaaagacattgagtgatgtaatccaccctgggggcaatagccatattgccaatggtgcggccgggtgtgtggcaacattacttcatgatgcagccatgaaccctgcggaaggctga

SEQ ID NO: 101 - protein, 94 aa, Homo sapiens
MQSLQPDPAARYRNVLEALWRIIRTEGLWRPMRGLNVTATGAGPAHALYFACYEKLKKTLSDVIHPGGNSHIANGAAGCVATLLHDAAMNPAEG

SEQ ID NO: 102 - DNA, 396 bp, Homo sapiens
  CDS (1)...(396)
atgcagagtctacagcctgacccagctgcccgctatcgcaatgtgttggaggccctctggaggattataagaacggagggcctatggaggcccatgagggggctgaacgtcacagcaacaggcgcagggcctgcccacgccctttattttgcctgctacgaaaagttaaaaaagacattgagtgatgtaatccaccctgggggcaatagccatattgccaatggtgcggccgggtgtgtggcaacattacttcatgatgcagccatgaaccctgcggaaggtaatgattcctcaacctatcactctgtgggcagctgcacctgtatttctttacagtttgcagaagaaagcacatcagttttggtgggaaattctgttaccttgttttaccactag

SEQ ID NO: 103 - protein, 131 aa, Homo sapiens
MQSLQPDPAARYRNVLEALWRIIRTEGLWRPMRGLNVTATGAGPAHALYFACYEKLKKTLSDVIHPGGNSHIANGAAGCVATLLHDAAMNPAEGNDSSTYHSVGSCTCISLQFAEESTSVLVGNSVTLFYH

SEQ ID NO: 104 - DNA, 1818 bp, Homo sapiens
  CDS (1)...(1818)
atgctgagcctcctcgtctggatcctcactctctccgatactttctcccaagggacccagacccgcttcagccaggagccagctgaccagacggtggtggctggacagcgggccgtgctcccctgtgtgctgctcaactactctggaattgtgcaatggaccaaggacgggctggccctgggcatgggccagggcctcaaagcctggccacggtaccgggttgtgggctccgcagacgctgggcagtacaacctggagatcacagatgctgagctctctgacgacgcctcttacgagtgccaggccacggaggccgccctgcgctctcggcgggccaaactcaccgtgctcatccccccagaggacaccaggattgacggaggccctgtgattctactgcaggcaggcaccccccacaacctcacatgccgggccttcaatgcgaagcctgctgccaccatcatctggttccgggacgggacgcagcaggagggcgctgtggccagcacggaattgctgaaggatgggaagagggagaccaccgtgagccaactgcttattaaccccacggacctggacatagggcgtgtcttcacttgccgaagcatgaacgaagccatccctagtggcaaggagacttccatcgagctggatgtgcaccaccctcctacagtgaccctgtccattgagccacagacggtgcaggagggtgagcgtgttgtctttacctgccaggccacagccaacccsgagatcttgggctacaggtgggccaaagggggtttcttgattgaagacgcccacgagagtcgctatgagacaaatgtggattattcctttttcacggagcctgtgtcttgtgaggttcacaacaaagtgggaagcaccaatgtcagcactttagtaaatgtccactttgctccccggattgtagttgaccccaaacccacaaccacagacattggctctgatgtgacccttacctgtgtctgggttgggaatccccccctcactctcacctggaccaaaaaggactcaaatatggtcctgagtaacagcaaccagctgctgctgaagtcggtgactcaggcagacgctggcacctacacctgccgggccatcgtgcctcgaatcggagtggctgagcgggaggtgccgctctatgtgaacgggccccccatcatctccagtgaggcagtgcagtatgctgtgaggggtgacggtggcaaggtggagtgtttcattgggagcacaccacccccagaccgcatagcatgggcctggaaggagaacttcttggaggtggggaccctggaacgctatacagtggagaggaccaactcaggcagtggggtgctatccacgctcaccatcaacaatgtcatggaggccgactttcagactcactacaactgcaccgcctggaacagcttcgggccaggcacagccatcatccagctggaagagcgagaggtgttacctgtgggcatcatagctggggccaccatcggcgcgagcatcctgctcatcttcttcttcatcgccttggtattcttcctctaccggcgccgcaaaggcagtcgcaaagacgtgaccctgaggaagctggatatcaaggtggagacagtgaaccgagagccacttacgatgcattctgaccgggaggatgacaccgccagcgtctccacagcaacccgggtcatgaaggccatctactcgtcgtttaaggatgatgtggatctgaagcaggacctgcgctgcgacaccatcgagcggccgcgaattcgcggccgcttgaatacatcttatagtgattaa

SEQ ID NO: 105 - protein, 605 aa, Homo sapiens
  VARIANT (1)...(605): Xaa = Any Amino Acid
MLSLLVWILTLSDTFSQGTQTRFSQEPADQTVVAGQRAVLPCVLLNYSGIVQWTKDGLALGMGQGLKAWPRYRVVGSADAGQYNLEITDAELSDDASYECQATEAALRSRRAKLTVLIPPEDTRIDGGPVILLQAGTPHNLTCRAFNAKPAATIIWFRDGTQQEGAVASTELLKDGKRETTVSQLLINPTDLDIGRVFTCRSMNEAIPSGKETSIELDVHHPPTVTLSIEPQTVQEGERVVFTCQATANXEILGYRWAKGGFLIEDAHESRYETNVDYSFFTEPVSCEVHNKVGSTNVSTLVNVHFAPRIVVDPKPTTTDIGSDVTLTCVWVGNPPLTLTWTKKDSNMVLSNSNQLLLKSVTQADAGTYTCRAIVPRIGVAEREVPLYVNGPPIISSEAVQYAVRGDGGKVECFIGSTPPPDRIAWAWKENFLEVGTLERYTVERTNSGSGVLSTLTINNVMEADFQTHYNCTAWNSFGPGTAIIQLEEREVLPVGIIAGATIGASILLIFFFIALVFFLYRRRKGSRKDVTLRKLDIKVETVNREPLTMHSDREDDTASVSTATRVMKAIYSSFKDDVDLKQDLRCDTIERPRIRGRLNTSYSD

SEQ ID NO: 106 - DNA, 1212 bp, Homo sapiens
  CDS (1)...(1212)
atgaacgaagccatccctagtggcaaggagacttccatcgagctggatgtgcaccaccctcctacagtgaccctgtccattgagccacagacggtgcaggagggtgagcgtgttgtctttacctgccaggccacagccaacccsgagatcttgggctacaggtgggccaaagggggtttcttgattgaagacgcccacgagagtcgctatgagacaaatgtggattattcctttttcacggagcctgtgtcttgtgaggttcacaacaaagtgggaagcaccaatgtcagcactttagtaaatgtccactttgctccccggattgtagttgaccccaaacccacaaccacagacattggctctgatgtgacccttacctgtgtctgggttgggaatccccccctcactctcacctggaccaaaaaggactcaaatatggtcctgagtaacagcaaccagctgctgctgaagtcggtgactcaggcagacgctggcacctacacctgccgggccatcgtgcctcgaatcggagtggctgagcgggaggtgccgctctatgtgaacgggccccccatcatctccagtgaggcagtgcagtatgctgtgaggggtgacggtggcaaggtggagtgtttcattgggagcacaccacccccagaccgcatagcatgggcctggaaggagaacttcttggaggtggggaccctggaacgctatacagtggagaggaccaactcaggcagtggggtgctatccacgctcaccatcaacaatgtcatggaggccgactttcagactcactacaactgcaccgcctggaacagcttcgggccaggcacagccatcatccagctggaagagcgagaggtgttacctgtgggcatcatagctggggccaccatcggcgcgagcatcctgctcatcttcttcttcatcgccttggtattcttcctctaccggcgccgcaaaggcagtcgcaaagacgtgaccctgaggaagctggatatcaaggtggagacagtgaaccgagagccacttacgatgcattctgaccgggaggatgacaccgccagcgtctccacagcaacccgggtcatgaaggccatctactcgtcgtttaaggatgatgtggatctgaagcaggacctgcgctgcgacaccatcgagcggccgcgaattcgcggccgcttgaatacatcttatagtgattaa

SEQ ID NO: 107 - protein, 403 aa, Homo sapiens
  VARIANT (1)...(403): Xaa = Any Amino Acid
MNEAIPSGKETSIELDVHHPPTVTLSIEPQTVQEGERVVFTCQATANXEILGYRWAKGGFLIEDAHESRYETNVDYSFFTEPVSCEVHNKVGSTNVSTLVNVHFAPRIVVDPKPTTTDIGSDVTLTCVWVGNPPLTLTWTKKDSNMVLSNSNQLLLKSVTQADAGTYTCRAIVPRIGVAEREVPLYVNGPPIISSEAVQYAVRGDGGKVECFIGSTPPPDRIAWAWKENFLEVGTLERYTVERTNSGSGVLSTLTINNVMEADFQTHYNCTAWNSFGPGTAIIQLEEREVLPVGIIAGATIGASILLIFFFIALVFFLYRRRKGSRKDVTLRKLDIKVETVNREPLTMHSDREDDTASVSTATRVMKAIYSSFKDDVDLKQDLRCDTIERPRIRGRLNTSYSD

SEQ ID NO: 108 - DNA, 1398 bp, Homo sapiens
  CDS (1)...(1398)
atgggtcctttgaaagcttttctcttctccccttttcttctgcggagtcaaagtagaggggtgaggttggtcttcttgttactgaccctgcatttgggaaactgtgttgataaggcagatgatgaagatgatgaggatttaacggtgaacaaaacctgggtcttggccccaaaaattcatgaaggagatatcacacaaattctgaattcattgcttcaaggctatgacaataaacttcgtccagatataggagtgaggcccacrgtaattgaaactgatgtttatgtaaacagcattggaccagttgatccaattaatatggaatatacaatagatataatttttgcccaaacctggtttgacagtcgtttaaaattcaatagtaccatgaaagtgcttatgcttaacagtaatatggttggaaaaatttggattcctgacactttcttcagaaactcaagaaaatctgatgctcactggataacaactcctaatcgtctgcttcgaatttggaatgatggacgagttctgtatactctaagattgacaattaatgcagaatgttatcttcagcttcataactttcccatggatgaacattcctgtccactggaattttcaagctatggataccctaaaaatgaaattgagtataagtggaaaaagccctccgtagaagtggctgatcctaaatactggagattatatcagtttgcatttgtagggttacggaactcaactgaaatcactcacacgatctcwggggattakgttatcatgacaattttttttgacctgagcagaagaatgggatatttcactattcagacctacattccatgcattctgacagttgttctttcttgggtgtctttttggatcaataaagatgcagtgcctgcaagaacatcgttgggtatcactacagttctgactatgacaaccctgagtacaattgccaggaagtctttacctaaggtttcttatgtgactgcgatggatctctttgtttctgtttgtttcatttttgtttttgcagccttgatggaatatggaaccttgcattattttaccagcaaccaaaaaggaaagactgctactaaagacagaaagctaaaaaataaagcctcgatgactcctggtctccatcctggatccactctgattccaatgaataatatttctgtgccgcaagaagatgattatgggtatcagtgtttggagggcaaagattgtgccagcttcttctgttgctttgaagactgcagaacaggatcttggagggaaggaaggatacacatacgcattgccaaaattgactcttattctagaatatttttcccaaccgcttttgccctgttcaacttggtttattgggttggctatctttacttataa

SEQ ID NO: 109 - protein, 465 aa, Homo sapiens
  VARIANT (1)...(465): Xaa = Any Amino Acid
MGPLKAFLFSPFLLRSQSRGVRLVFLLLTLHLGNCVDKADDEDDEDLTVNKTWVLAPKIHEGDITQILNSLLQGYDNKLRPDIGVRPXVIETDVYVNSIGPVDPINMEYTIDIIFAQTWFDSRLKFNSTMKVLMLNSNMVGKIWIPDTFFRNSRKSDAHWITTPNRLLRIWNDGRVLYTLRLTINAECYLQLHNFPMDEHSCPLEFSSYGYPKNEIEYKWKKPSVEVADPKYWRLYQFAFVGLRNSTEITHTIXGDXVIMTIFFDLSRRMGYFTIQTYIPCILTVVLSWVSFWINKDAVPARTSLGITTVLTMTTLSTIARKSLPKVSYVTAMDLFVSVCFIFVFAALMEYGTLHYFTSNQKGKTATKDRKLKNKASMTPGLHPGSTLIPMNNISVPQEDDYGYQCLEGKDCASFFCCFEDCRTGSWREGRIHIRIAKIDSYSRIFFPTAFALFNLVYWVGYLYL

SEQ ID NO: 110 - DNA, 771 bp, Homo sapiens
  CDS (1)...(771)
atgggtcctttgaaagcttttctcttctccccttttcttctgcggagtcaaagtagaggggtgaggttggtcttcttgttactgaccctgcatttgggaaactgtgttgataaggcagatgatgaagatgatgaggatttaacggtgaacaaaacctgggtcttggccccaaaaattcatgaaggagatatcacacaaattctgaattcattgcttcaaggctatgacaataaacttcgtccagatataggagtgaggcccacagtaattgaaactgatgtttatgtaaacagcattggaccagttgatccaattaatatggaatatacaatagatataatttttgcccaaacctggtttgacagtcgtttaaaattcaatagtaccatgaaagtgcttatgcttaacagtaatatggttggaaaaatttggattcctgacactttcttcagaaactcaagaaaatctgatgctcactggataacaactcctaatcgtctgcttcgaatttggaatgatggacgagttctgtatactctaagattgacaattaatgcagaatgttatcttcagcttcataactttcccatggatgaacattcctgtccactggaattttcaagctatggataccctaaaaatgaaattgagtataagtggaaaaagccctccgtagaagtggctgatcctaaatactggagattatatcagtttgcatttgtagggttacggaactcaactgaaatcactcacacgatctctggggattag

SEQ ID NO: 111 - protein, 256 aa, Homo sapiens
MGPLKAFLFSPFLLRSQSRGVRLVFLLLTLHLGNCVDKADDEDDEDLTVNKTWVLAPKIHEGDITQILNSLLQGYDNKLRPDIGVRPTVIETDVYVNSIGPVDPINMEYTIDIIFAQTWFDSRLKFNSTMKVLMLNSNMVGKIWIPDTFFRNSRKSDAHWITTPNRLLRIWNDGRVLYTLRLTINAECYLQLHNFPMDEHSCPLEFSSYGYPKNEIEYKWKKPSVEVADPKYWRLYQFAFVGLRNSTEITHTISGD

SEQ ID NO: 112 - DNA, 1568 bp, Homo sapiens
ggtgcactgcctttccacactctcccttctgtactcagccagctgctgctgaggtgggaggaaaagtcctggctgggagaattgagctagtgcagcacacgtaaaaaagcgattccgatgggtcctttgaaagcttttctcttctccccttttcttctgcggagtcaaagtagaggggtgaggttggtcttcttgttactgaccctgcatttgggaaactgtgttgataaggcagatgatgaagatgatgaggatttaacggtgaacaaaacctgggtcttggccccaaaaattcatgaaggagatatcacacaaattctgaattcattgcttcaaggctatgacaataaacttcgtccagatataggagtgaggcccacrgtaattgaaactgatgtttatgtaaacagcattggaccagttgatccaattaatatggaatatacaatagatataatttttgcccaaacctggtttgacagtcgtttaaaattcaatagtaccatgaaagtgcttatgcttaacagtaatatggttggaaaaatttggattcctgacactttcttcagaaactcaagaaaatctgatgctcactggataacaactcctaatcgtctgcttcgaatttggaatgatggacgagttctgtatactctaagattgacaattaatgcagaatgttatcttcagcttcataactttcccatggatgaacattcctgtccactggaattttcaagctatggataccctaaaaatgaaattgagtataagtggaaaaagccctccgtagaagtggctgatcctaaatactggagattatatcagtttgcatttgtagggttacggaactcaactgaaatcactcacacgatctcwggggattakgttatcatgacaattttttttgacctgagcagaagaatgggatatttcactattcagacctacattccatgcattctgacagttgttctttcttgggtgtctttttggatcaataaagatgcagtgcctgcaagaacatcgttgggtatcactacagttctgactatgacaaccctgagtacaattgccaggaagtctttacctaaggtttcttatgtgactgcgatggatctctttgtttctgtttgtttcatttttgtttttgcagccttgatggaatatggaaccttgcattattttaccagcaaccaaaaaggaaagactgctactaaagacagaaagctaaaaaataaagcctcgatgactcctggtctccatcctggatccactctgattccaatgaataatatttctgtgccgcaagaagatgattatgggtatcagtgtttggagggcaaagattgtgccagcttcttctgttgctttgaagactgcagaacaggatcttggagggaaggaaggatacacatacgcattgccaaaattgactcttattctagaatatttttcccaaccgcttttgccctgttcaacttggtttattgggttggctatctttacttataaaatctacttcataagcaaaaatcaaaagaagtcttgacttaaatttcaagtag

SEQ ID NO: 113 - DNA, 3030 bp, Homo sapiens
  CDS (1)...(3030)
atggatttaatccgaggcgtcttgctccggctcctgctcctggcttccagcctcggacccggcgcggtgtcgctccgagcggccatccgaaaaccaggcaaggtagggcctcctcttgacatcaagctgggcgcattgaactgtacggctttcagcatccagtggaaaatgccaaggcatcctggaagtcccatccttgggtacactgtcttttactctgaggttggcgcagataaatccctgcaggagcagttgcacagcgtgcctctcagccgggacatcccgaccacggaggaagtgattggagatttgaaaccaggcactgaatatcgtgtgagcatagcagcttacagccaggctggcaaagggcggctgagctctcctcggcatgtcaccactttgtcccaagattcctgcctgcctcctgcagctccccagcagccacatgtcattgtggtttcggattctgaggtggccctgtcttggaaacctggagcgagtgaaggaagcgcccctattcagtactattctgtggaattcatcaggccagatttcgacaagaagtggacctcaatccatgagcggatccagatggactccatggttatcaagggcctcgatccagataccaactaccagtttgccgtgagggcaatgaattcccatggccccagcccccgcagctggcccagtgacatcatccggaccctctgccctgaggaggcgggaagtggccgctatggaccccgttatatcaccgacatgggagctggtgaggatgatgaaggatttgaagacgacttagatttggatatttcctttgaggaggttaaaccacttcctgctaccaaaggagggaataagaaatttttggtggaaagcaagaagatgtctatatctaacccaaagaccatttctaggctcatcccccctacctcagcatctctccctgtgaccacggtggctccccagcccattcccatacagagaaaggggaagaatggtgtggccataatgtcaaggctctttgacatgccttgtgatgaaactctctgctctgctgacagcttctgtgtcaatgactacacctgggggggctcgcgatgccagtgcaccctgggcaaaggtggtgagagctgctcagaagatattgttatccaktatcctcagttctttggccactcctatgtaacgtttgaacctctgaagaattcttatcaggcatttcaaattactcttgaatttagggcggaggcagaggatggcttactgctctactgtggggagaacgaacacgggaggggggatttcatgtccctggctatcatccgacgctccctgcagttcaggtttaattgtggaactggggttgccatcatcgtaagtgagaccaaaatcaaactagggggttggcacacggttatgctctacagagatgggctgaacgggctgctgcagctgaacaatggcaccccagtgacaggccagtctcagggccaatacagtaaaattactttccggacacctctctatcttggtggcgctcccagcgcttactggttggttagagcaacagggacaaaccgaggctttcaaggctgtgtgcagtcgctcgctgtgaatgggaggagaattgacatgaggccctggcccctgggaaaagcactcagtggggctgatgtgggggaatgcagcagtggaatctgtgatgaggcctcgtgcatccatggtggcacctgcacagcaatcaaagccgactcctacatttgcctctgtccccttgggtttaaaggtcgacactgtgaagatgctttcaccttgaccattcctcagttcagagagtctctgagatcttacgctgcaactccctggccactggagccccagcattacctttccttcatggaatttgagatcacatttcggccagactcaggagatggtgtcctcctgtacagctatgacacaggcagcaaagacttcctgtccatcaacttggcagggggccacgtggagttccgctttgactgtggctctgggaccggtgtcctcaggagtgaagatcccctcaccctgggcaactggcacgagcttcgtgtatctcgcacagcaaagaatggaatcttacaggtggataagcagaagatagtggagggaatggcagagggaggcttcacacagattaagtgcaacacagacattttcattggcggagtccccaattatgatgatgtgaagaagaactcgggtgtcctgaagcctttcagcgggagcatccagaagatcatcctgaatgaccgaaccatccatgtgaagcatgacttcacctccggagtgaatgtggagaatgcggcccacccctgtgtgagagccccttgtgcccatgggggcagctgccggcccaggaaggagggctatgactgtgactgccccttgggctttgaggggcttcactgccagaaagcgatcatagaagccattgagatcccgcagtttatcggccgcagttacctgacgtatgacaacccasatatcttgaagagggtgtcaggatcaagatcaaatgtgttcatgaggtttaaaacaactgccaaggatggccttttgctgtggaggggagacagccccatgagacccaacagcgacttcatttccttgggccttcgggatggagccctcgtgttcagctataacctgggcagtggtgtggcatccatcatggtgaatggctccttcaacgatggtcggtggcaccgagttaaggccgttagggatggccagtcaggaaagataaccgtggatgactatggagccagaacaggcaaatccccaggcatgatgcggcagcttaacatcaatggagctctgtatgtgggtggaatgaaggaaattgctctgcacactaacaggcaatatatgagagggctcgtgggctgtatctctcacttcaccctgtccaccgattaccacatttccctcgtggaagatgccgtggatgggaaaaacatcaacacttgtggagccaagtaa

SEQ ID NO: 114 - protein, 1009 aa, Homo sapiens
  VARIANT (1)...(1009): Xaa = Any Amino Acid
MDLIRGVLLRLLLLASSLGPGAVSLRAAIRKPGKVGPPLDIKLGALNCTAFSIQWKMPRHPGSPILGYTVFYSEVGADKSLQEQLHSVPLSRDIPTTEEVIGDLKPGTEYRVSIAAYSQAGKGRLSSPRHVTTLSQDSCLPPAAPQQPHVIVVSDSEVALSWKPGASEGSAPIQYYSVEFIRPDFDKKWTSIHERIQMDSMVIKGLDPDTNYQFAVRAMNSHGPSPRSWPSDIIRTLCPEEAGSGRYGPRYITDMGAGEDDEGFEDDLDLDISFEEVKPLPATKGGNKKFLVESKKMSISNPKTISRLIPPTSASLPVTTVAPQPIPIQRKGKNGVAIMSRLFDMPCDETLCSADSFCVNDYTWGGSRCQCTLGKGGESCSEDIVIXYPQFFGHSYVTFEPLKNSYQAFQITLEFRAEAEDGLLLYCGENEHGRGDFMSLAIIRRSLQFRFNCGTGVAIIVSETKIKLGGWHTVMLYRDGLNGLLQLNNGTPVTGQSQGQYSKITFRTPLYLGGAPSAYWLVRATGTNRGFQGCVQSLAVNGRRIDMRPWPLGKALSGADVGECSSGICDEASCIHGGTCTAIKADSYICLCPLGFKGRHCEDAFTLTIPQFRESLRSYAATPWPLEPQHYLSFMEFEITFRPDSGDGVLLYSYDTGSKDFLSINLAGGHVEFRFDCGSGTGVLRSEDPLTLGNWHELRVSRTAKNGILQVDKQKIVEGMAEGGFTQIKCNTDIFIGGVPNYDDVKKNSGVLKPFSGSIQKIILNDRTIHVKHDFTSGVNVENAAHPCVRAPCAHGGSCRPRKEGYDCDCPLGFEGLHCQKAIIEAIEIPQFIGRSYLTYDNPXILKRVSGSRSNVFMRFKTTAKDGLLLWRGDSPMRPNSDFISLGLRDGALVFSYNLGSGVASIMVNGSFNDGRWHRVKAVRDGQSGKITVDDYGARTGKSPGMMRQLNINGALYVGGMKEIALHTNRQYMRGLVGCISHFTLSTDYHISLVEDAVDGKNINTCGAK

SEQ ID NO: 115 - DNA, 459 bp, Homo sapiens
  CDS (1)...(459)
atgaggtttaaaacaactgccaaggatggccttttgctgtggaggggagacagccccatgagacccaacagcgacttcatttccttgggccttcgggatggagccctcgtgttcagctataacctgggcagtggtgtggcatccatcatggtgaatggctccttcaacgatggtcggtggcaccgagttaaggccgttagggatggccagtcaggaaagataaccgtggatgactatggagccagaacaggcaaatccccaggcatgatgcggcagcttaacatcaatggagctctgtatgtgggtggaatgaaggaaattgctctgcacactaacaggcaatatatgagagggctcgtgggctgtatctctcacttcaccctgtccaccgattaccacatttccctcgtggaagatgccgtggatgggaaaaacatcaacacttgtggagccaagtaa

SEQ ID NO: 116 - protein, 152 aa, Homo sapiens
MRFKTTAKDGLLLWRGDSPMRPNSDFISLGLRDGALVFSYNLGSGVASIMVNGSFNDGRWHRVKAVRDGQSGKITVDDYGARTGKSPGMMRQLNINGALYVGGMKEIALHTNRQYMRGLVGCISHFTLSTDYHISLVEDAVDGKNINTCGAK

SEQ ID NO: 117 - DNA, 3799 bp, Homo sapiens
cgccgacctcccggctgcagtcctacctcttggaactacccgtgtttccgggcccagccctcgcagccccccacctcctcgccccggcccggggatccgttggggccgcgtcccccacgcgcccccggagacgccctttccgtgtgcgcccgggacttggtgaaactttgcaggcgccggctgcgaaatggatttaatccgaggcgtcttgctccggctcctgctcctggcttccagcctcggacccggcgcggtgtcgctccgagcggccatccgaaaaccaggcaaggtagggcctcctcttgacatcaagctgggcgcattgaactgtacggctttcagcatccagtggaaaatgccaaggcatcctggaagtcccatccttgggtacactgtcttttactctgaggttggcgcagataaatccctgcaggagcagttgcacagcgtgcctctcagccgggacatcccgaccacggaggaagtgattggagatttgaaaccaggcactgaatatcgtgtgagcatagcagcttacagccaggctggcaaagggcggctgagctctcctcggcatgtcaccactttgtcccaagattcctgcctgcctcctgcagctccccagcagccacatgtcattgtggtttcggattctgaggtggccctgtcttggaaacctggagcgagtgaaggaagcgcccctattcagtactattctgtggaattcatcaggccagatttcgacaagaagtggacctcaatccatgagcggatccagatggactccatggttatcaagggcctcgatccagataccaactaccagtttgccgtgagggcaatgaattcccatggccccagcccccgcagctggcccagtgacatcatccggaccctctgccctgaggaggcgggaagtggccgctatggaccccgttatatcaccgacatgggagctggtgaggatgatgaaggatttgaagacgacttagatttggatatttcctttgaggaggttaaaccacttcctgctaccaaaggagggaataagaaatttttggtggaaagcaagaagatgtctatatctaacccaaagaccatttctaggctcatcccccctacctcagcatctctccctgtgaccacggtggctccccagcccattcccatacagagaaaggggaagaatggtgtggccataatgtcaaggctctttgacatgccttgtgatgaaactctctgctctgctgacagcttctgtgtcaatgactacacctgggggggctcgcgatgccagtgcaccctgggcaaaggtggtgagagctgctcagaagatattgttatccaktatcctcagttctttggccactcctatgtaacgtttgaacctctgaagaattcttatcaggcatttcaaattactcttgaatttagggcggaggcagaggatggcttactgctctactgtggggagaacgaacacgggaggggggatttcatgtccctggctatcatccgacgctccctgcagttcaggtttaattgtggaactggggttgccatcatcgtaagtgagaccaaaatcaaactagggggttggcacacggttatgctctacagagatgggctgaacgggctgctgcagctgaacaatggcaccccagtgacaggccagtctcagggccaatacagtaaaattactttccggacacctctctatcttggtggcgctcccagcgcttactggttggttagagcaacagggacaaaccgaggctttcaaggctgtgtgcagtcgctcgctgtgaatgggaggagaattgacatgaggccctggcccctgggaaaagcactcagtggggctgatgtgggggaatgcagcagtggaatctgtgatgaggcctcgtgcatccatggtggcacctgcacagcaatcaaagccgactcctacatttgcctctgtccccttgggtttaaaggtcgacactgtgaagatgctttcaccttgaccattcctcagttcagagagtctctgagatcttacgctgcaactccctggccactggagccccagcattacctttccttcatggaatttgagatcacatttcggccagactcaggagatggtgtcctcctgtacagctatgacacaggcagcaaagacttcctgtccatcaacttggcagggggccacgtggagttccgctttgactgtggctctgggaccggtgtcctcaggagtgaagatcccctcaccctgggcaactggcacgagcttcgtgtatctcgcacagcaaagaatggaatcttacaggtggataagcagaagatagtggagggaatggcagagggaggcttcacacagattaagtgcaacacagacattttcattggcggagtccccaattatgatgatgtgaagaagaactcgggtgtcctgaagcctttcagcgggagcatccagaagatcatcctgaatgaccgaaccatccatgtgaagcatgacttcacctccggagtgaatgtggagaatgcggcccacccctgtgtgagagccccttgtgcccatgggggcagctgccggcccaggaaggagggctatgactgtgactgccccttgggctttgaggggcttcactgccagaaagcgatcatagaagccattgagatcccgcagtttatcggccgcagttacctgacgtatgacaacccasatatcttgaagagggtgtcaggatcaagatcaaatgtgttcatgaggtttaaaacaactgccaaggatggccttttgctgtggaggggagacagccccatgagacccaacagcgacttcatttccttgggccttcgggatggagccctcgtgttcagctataacctgggcagtggtgtggcatccatcatggtgaatggctccttcaacgatggtcggtggcaccgagttaaggccgttagggatggccagtcaggaaagataaccgtggatgactatggagccagaacaggcaaatccccaggcatgatgcggcagcttaacatcaatggagctctgtatgtgggtggaatgaaggaaattgctctgcacactaacaggcaatatatgagagggctcgtgggctgtatctctcacttcaccctgtccaccgattaccacatttccctcgtggaagatgccgtggatgggaaaaacatcaacacttgtggagccaagtaacaccagctggccttgtccaagggacagagccttctattctgagaatcccaggggccctcagaccctgcctgatgctatatgcagaggcccagggaccaggtgtgtttcctctcaccaagaagaaagtacacactgatgagaaactgagaaccaagacaggcatccctgggtggcctttcctgctgacactccacgagctgacccagcagaattctctgtgtaggaagcatcggactttgtccattgaatatgtagcggctgccagagatcacacatcaatgcaaattccagagcctgtctgctatagctcagtgactgtgttgtgattcatagtccattaaaaagagagagagagagaaagaatcccacagggcactattaaaatacttctctccttccctgactcatgacactcttcctgacagcagaatgactgtgtgaccttgaacttcacatttcccacattggcccttggattgttcggattaaccccttccactcctcactggctggtcactgtgttctgactagtccataaaaataaagatggaggagatcaaaaaaaaaaaaaaaaaaaaaaaa

SEQ ID NO: 118 - DNA, 858 bp, Homo sapiens
  CDS (1)...(858)
atgggaaggttgaatggcgatgacttcctggctgtgggcctgctcaatggcagtgtggtttatagttataacctggggtctggcatagcaagcatcaggagcgagcccctcaatctgagccttggagtccacactgttcatctgggcaagttcttccaagagggctggctgaaggtagatgatcataaaaataaatccattatcgccccaggaagactggttggtctcaatgtcttcagtcagttttatgtaggtggctacagtgaatacactccagatctcttaccaaatggagcagattttaaaaatggttttcaagttcaaaaggcaagagacagactgcagtcaacccatccataccaccaaggggtagcccacagaggccagagcaagccaagaggattaaggacaacattgtgcttggaaacattaagattgcacactcctggaagtatgtcaactgccacagtctttagctgtattttcactcttcaagttcgcactgagaaggatggccatttcagaggactgggaaatcctgagggccacccaaatgctggacgcagtgttggccagtgtcatgcttctccccgcagtttaatgaaatgtggcaatggtgggacatgcatagagagtggaactagtgtttactgcaattgtmccactgggtggaaaggatcattctgcacagagacagtttctacctgtgatcctgaacatgaccctccacaccactgtagcagaggagcaacctgcatttcattacctcatggatacacctgtttctgtcctctaggaaccactggaatctactgtgaacaaggtcatcaatttattggaaaagatgttttcaaataa

SEQ ID NO: 119 - protein, 285 aa, Homo sapiens
  VARIANT (1)...(285): Xaa = Any Amino Acid
MGRLNGDDFLAVGLLNGSVVYSYNLGSGIASIRSEPLNLSLGVHTVHLGKFFQEGWLKVDDHKNKSIIAPGRLVGLNVFSQFYVGGYSEYTPDLLPNGADFKNGFQVQKARDRLQSTHPYHQGVAHRGQSKPRGLRTTLCLETLRLHTPGSMSTATVFSCIFTLQVRTEKDGHFRGLGNPEGHPNAGRSVGQCHASPRSLMKCGNGGTCIESGTSVYCNCXTGWKGSFCTETVSTCDPEHDPPHHCSRGATCISLPHGYTCFCPLGTTGIYCEQGHQFIGKDVFK

SEQ ID NO: 120 - DNA, 465 bp, Homo sapiens
  CDS (1)...(465)
atgggaaggttgaatggcgatgacttcctggctgtgggcctgctcaatggcagtgtggtttatagttataacctggggtctggcatagcaagcatcaggagcgagcccctcaatctgagccttggagtccacactgttcatctgggcaagttcttccaagagggctggctgaaggtagatgatcataaaaataaatccattatcgccccaggaagactggttggtctcaatgtcttcagtcagttttatgtaggtggctacagtgaatacactccagatctcttaccaaatggagcagattttaaaaatggttttcaagctgcaattgtmccactgggtggaaaggatcattctgcacagagacagtttctacctgtgatcctgaacatgaccctccacaccactgtagcagaggagcaacctgcatttcattacctcatggatacacctgtttctgtcctctag

SEQ ID NO: 121 - protein, 154 aa, Homo sapiens
  VARIANT (1)...(154): Xaa = Any Amino Acid
MGRLNGDDFLAVGLLNGSVVYSYNLGSGIASIRSEPLNLSLGVHTVHLGKFFQEGWLKVDDHKNKSIIAPGRLVGLNVFSQFYVGGYSEYTPDLLPNGADFKNGFQAAIXPLGGKDHSAQRQFLPVILNMTLHTTVAEEQPAFHYLMDTPVSVL

SEQ ID NO: 122 - DNA, 405 bp, Homo sapiens
  CDS (1)...(405)
atgtcaactgccacagtctttagctgtattttcactcttcaagttcgcactgagaaggatggccatttcagaggactgggaaatcctgagggccacccaaatgctggacgcagtgttggccagtgtcatgcttctccccgcagtttaatgaaatgtggcaatggtgggacatgcatagagagtggaactagtgtttactgcaattgtmccactgggtggaaaggatcattctgcacagagacagtttctacctgtgatcctgaacatgaccctccacaccactgtagcagaggagcaacctgcatttcattacctcatggatacacctgtttctgtcctctaggaaccactggaatctactgtgaacaaggtcatcaatttattggaaaagatgttttcaaataa

SEQ ID NO: 123 - protein, 134 aa, Homo sapiens
  VARIANT (1)...(134): Xaa = Any Amino Acid
MSTATVFSCIFTLQVRTEKDGHFRGLGNPEGHPNAGRSVGQCHASPRSLMKCGNGGTCIESGTSVYCNCXTGWKGSFCTETVSTCDPEHDPPHHCSRGATCISLPHGYTCFCPLGTTGIYCEQGHQFIGKDVFK

SEQ ID NO: 124 - DNA, 1654 bp, Homo sapiens
aagaagtttaattgactcactgttcagcatggctggggaggcctccggaaatttacaagcatggtggaaggggaagaggaagcagagtactttcttcacaaggcagcaggaagacgtgcctagtaaaggggagaatttctccttataaaaccatcagatctcctgagaactcactcactatcacgagaacgcatgaggaaaaccacccccatgatttaattacctccacctggtctctcccttgacacctggggattatggggattacaattcaagatgaggtttgcgtgggaacacaaaacctaaccatatcagctacctttcataatcaaaagaaaaaattcctacaggcaaacatgaggacagggaaggtgaccaagtcacatgggaaggttgaatggcgatgacttcctggctgtgggcctgctcaatggcagtgtggtttatagttataacctggggtctggcatagcaagcatcaggagcgagcccctcaatctgagccttggagtccacactgttcatctgggcaagttcttccaagagggctggctgaaggtagatgatcataaaaataaatccattatcgccccaggaagactggttggtctcaatgtcttcagtcagttttatgtaggtggctacagtgaatacactccagatctcttaccaaatggagcagattttaaaaatggttttcaagttcaaaaggcaagagacagactgcagtcaacccatccataccaccaaggggtagcccacagaggccagagcaagccaagaggattaaggacaacattgtgcttggaaacattaagattgcacactcctggaagtatgtcaactgccacagtctttagctgtattttcactcttcaagttcgcactgagaaggatggccatttcagaggactgggaaatcctgagggccacccaaatgctggacgcagtgttggccagtgtcatgcttctccccgcagtttaatgaaatgtggcaatggtgggacatgcatagagagtggaactagtgtttactgcaattgtaccactgggtggaaaggatcattctgcacagagacagtttctacctgtgatcctgaacatgaccctccacaccactgtagcagaggagcaacctgcatttcattacctcatggatacacctgtttctgtcctctaggaaccactggaatctactgtgaacaaggtcatcaatttattggaaaagatgttttcaaataatttatccaacatttttggtggttttcatgatggagatgaggtaaatcatgttatctaatctactatactgctggaaacaaaagtcaactattggatttattttaaaagaagcccatctggccgggcgcagtggctcatgcctgtaatctcagcactttgggaggccaaggcgggcaaatcacctgaggtcaggagttcgagaccagcttggccaacatggggaaaccccgtctctactaaaaacacaaaaattagccgggtgtagtggtgggcgcccgtaatcccagctactcgggaggctgaggcaggagaatcgcttgaacccaggaggcagaggttgcagtgagccaagattgcgccactgcactccaacatgggtgacagagcaaaactctgtctcagaaaaaaaaaa

SEQ ID NO: 125 - DNA, 1734 bp, Homo sapiens
  CDS (1)...(1734)
atggggagagcggcggccaccgcaggcggcggcggaggggcgcgccgctggctcccgtggctggggctgtgcttctgggcggcagggaccgcggctgcccgaggaactgacaatggcgaagcccttcccgaatccatcccatcagctcctgggacactgcctcatttcatagaggagccagatgatgcttatattatcaagagcaaccctattgcactcaggtgcaaagcgaggccagccatgcagatattcttcaaatgcaacggcgagtgggtccatcagaacgagcacgtctctgaagagactctggacgagagctcaggtttgaaggtccgcgaagtgttcatcaatgttactaggcaacaggtggaggacttccatgggcccgaggactattggtgccagtgtgtggcgtggagccacctgggtacctccaagagcaggaaggcctctgtgcgcatagcctatttacggaaaaactttgaacaagacccacaaggaagggaagttcccattgaaggcatgattgtactgcactgccgcccaccagagggagtccctgctgccgaggtggaatggctgaaaaatgaagagcccattgactctgaacaagacgagaacattgacaccagggctgaccataacctgatcatcaggcaggcacggctctcggactcaggaaattacacctgcatggcagccaacatcgtggctaagaggagaagcctgtcggccactgttgtggtctacgtggatgggagctgggaagtgtggagcgaatggtccgtctgcagtccagagtgtgaacatttgcggatccgggagtgcacagcaccacccccgagaaatgggggcaaattctgtgaaggtctaagccaggaatctgaaaactgcacagatggtctttgcatcctagataaaaaacctcttcatgaaataaaaccccaaagcattgagaatgccagcgacattgctttgtactcgggcttgggtgctgccgtcgtggccgttgcagtcctggtcattggtgtcaccctttacagacggagccagagtgactatggcgtggacgtcattgactcttctgcattgacaggtggcttccagaccttcaacttcaaaacagtccgtcaagccaagaatatcatggaactaatgatacaagaaaaatcctttggtaactccctgctcctgaattctgccatgcagccagatctgacagtgagccggacatacagcggacccatctgtctgcaggaccctctggacaaggagctcatgacagagtcctcactctttaaccctttgtcggacatcaaagtgaaagtccagagctcgttcatggtttccctgggagtgtctgagagagctgagtaccacggcaagaatcattccaggacttttccccatggaaacaaccacagctttagtacaatgcatcccagaaataaaatgccctacatccaaaatctgtcatcactccccacaaggacagaactgaggacaactggtgtctttggccatttaggggggcgcttagtaatgccaaatacaggggtgagcttactcataccacacggtgccatcccagaggagaattcttgggagatttatatgtccatcaaccaaggtgaacccagtgaaaatccagcaaacaaaggatcaaatagcttgttgaagaacacatatgccattgggggaaaaataagcagacatctgggttcttctcgctga

SEQ ID NO: 126 - protein, 577 aa, Homo sapiens
MGRAAATAGGGGGARRWLPWLGLCFWAAGTAAARGTDNGEALPESIPSAPGTLPHFIEEPDDAYIIKSNPIALRCKARPAMQIFFKCNGEWVHQNEHVSEETLDESSGLKVREVFINVTRQQVEDFHGPEDYWCQCVAWSHLGTSKSRKASVRIAYLRKNFEQDPQGREVPIEGMIVLHCRPPEGVPAAEVEWLKNEEPIDSEQDENIDTRADHNLIIRQARLSDSGNYTCMAANIVAKRRSLSATVVVYVDGSWEVWSEWSVCSPECEHLRIRECTAPPPRNGGKFCEGLSQESENCTDGLCILDKKPLHEIKPQSIENASDIALYSGLGAAVVAVAVLVIGVTLYRRSQSDYGVDVIDSSALTGGFQTFNFKTVRQAKNIMELMIQEKSFGNSLLLNSAMQPDLTVSRTYSGPICLQDPLDKELMTESSLFNPLSDIKVKVQSSFMVSLGVSERAEYHGKNHSRTFPHGNNHSFSTMHPRNKMPYIQNLSSLPTRTELRTTGVFGHLGGRLVMPNTGVSLLIPHGAIPEENSWEIYMSINQGEPSENPANKGSNSLLKNTYAIGGKISRHLGSSR

SEQ ID NO: 127 - DNA, 1701 bp, Homo sapiens
  CDS (1)...(1701)
atggggagagcggcggccaccgcaggcggcggcggaggggcgcgccgctggctcccgtggctggggctgtgcttctgggcggcagggaccgcggctgcccgaggaactgacaatggcgaagcccttcccgaatccatcccatcagctcctgggacactgcctcatttcatagaggagccagatgatgcttatattatcaagagcaaccctattgcactcaggtgcaaagcgaggccagccatgcagatattcttcaaatgcaacggcgagtgggtccatcagaacgagcacgtctctgaagagactctggacgagagctcaggtttgaaggtccgcgaagtgttcatcaatgttactaggcaacaggtggaggacttccatgggcccgaggactattggtgccagtgtgtggcgtggagccacctgggtacctccaagagcaggaaggcctctgtgcgcatagcctatttacggaaaaactttgaacaagacccacaaggaagggaagttcccattgaaggcatgattgtactgcactgccgcccaccagagggagtccctgctgccgaggtggaatggctgaaaaatgaagagcccattgactctgaacaagacgagaacattgacaccagggctgaccataacctgatcatcaggcaggcacggctctcggactcaggaaattacacctgcatggcagccaacatcgtggctaagaggagaagcctgtcggccactgttgtggtctacgtggatgggagctgggaagtgtggagcgaatggtccgtctgcagtccagagtgtgaacatttgcggatccgggagtgcacagcaccacccccgagaaatgggggcaaattctgtgaaggtctaagccaggaatctgaaaactgcacagatggtctttgcatcctaggcattgagaatgccagcgacattgctttgtactcgggcttgggtgctgccgtcgtggccgttgcagtcctggtcattggtgtcaccctttacagacggagccagagtgactatggcgtggacgtcattgactcttctgcattgacaggtggcttccagaccttcaacttcaaaacagtccgtcaagccaagaatatcatggaactaatgatacaagaaaaatcctttggtaactccctgctcctgaattctgccatgcagccagatctgacagtgagccggacatacagcggacccatctgtctgcaggaccctctggacaaggagctcatgacagagtcctcactctttaaccctttgtcggacatcaaagtgaaagtccagagctcgttcatggtttccctgggagtgtctgagagagctgagtaccacggcaagaatcattccaggacttttccccatggaaacaaccacagctttagtacaatgcatcccagaaataaaatgccctacatccaaaatctgtcatcactccccacaaggacagaactgaggacaactggtgtctttggccatttaggggggcgcttagtaatgccaaatacaggggtgagcttactcataccacacggtgccatcccagaggagaattcttgggagatttatatgtccatcaaccaaggtgaacccagtgaaaatccagcaaacaaaggatcaaatagcttgttgaagaacacatatgccattgggggaaaaataagcagacatctgggttcttctcgctga

SEQ ID NO: 128 - protein, 566 aa, Homo sapiens
MGRAAATAGGGGGARRWLPWLGLCFWAAGTAAARGTDNGEALPESIPSAPGTLPHFIEEPDDAYIIKSNPIALRCKARPAMQIFFKCNGEWVHQNEHVSEETLDESSGLKVREVFINVTRQQVEDFHGPEDYWCQCVAWSHLGTSKSRKASVRIAYLRKNFEQDPQGREVPIEGMIVLHCRPPEGVPAAEVEWLKNEEPIDSEQDENIDTRADHNLIIRQARLSDSGNYTCMAANIVAKRRSLSATVVVYVDGSWEVWSEWSVCSPECEHLRIRECTAPPPRNGGKFCEGLSQESENCTDGLCILGIENASDIALYSGLGAAVVAVAVLVIGVTLYRRSQSDYGVDVIDSSALTGGFQTFNFKTVRQAKNIMELMIQEKSFGNSLLLNSAMQPDLTVSRTYSGPICLQDPLDKELMTESSLFNPLSDIKVKVQSSFMVSLGVSERAEYHGKNHSRTFPHGNNHSFSTMHPRNKMPYIQNLSSLPTRTELRTTGVFGHLGGRLVMPNTGVSLLIPHGAIPEENSWEIYMSINQGEPSENPANKGSNSLLKNTYAIGGKISRHLGSSR

SEQ ID NO: 129 - DNA, 1692 bp, Homo sapiens
  CDS (1)...(1692)
atggggagagcggcggccaccgcaggcggcggcggaggggcgcgccgctggctcccgtggctggggctgtgcttctgggcggcagggaccgcggctgcccgaggaactgacaatggcgaagcccttcccgaatccatcccatcagctcctgggacactgcctcatttcatagaggagccagatgatgcttatattatcaagagcaaccctattgcactcaggtgcaaagcgaggccagccatgcagatattcttcaaatgcaacggcgagtgggtccatcagaacgagcacgtctctgaagagactctggacgagagctcaggtttgaaggtccgcgaagtgttcatcaatgttactaggcaacaggtggaggacttccatgggcccgaggactattggtgccagtgtgtggcgtggagccacctgggtacctccaagagcaggaaggcctctgtgcgcatagcctatttacggaaaaactttgaacaagacccacaaggaagggaagttcccattgaaggcatgattgtactgcactgccgcccaccagagggagtccctgctgccgaggtggaatggctgaaaaatgaagagcccattgactctgaacaagacgagaacattgacaccagggctgaccataacctgatcatcaggcaggcacggctctcggactcaggaaattacacctgcatggcagccaacatcgtggctaagaggagaagcctgtcggccactgttgtggtctacgtggatgggagctgggaagtgtggagcgaatggtccgtctgcagtccagagtgtgaacatttgcggatccgggagtgcacagcaccacccccgagaaatgggggcaaattctgtgaaggtctaagccaggaatctgaaaactgcacagatggtctttgcatcctagataaaaaacctcttcatgaaataaaaccccaaagcattgagaatgccagcgacattgctttgtactcgggcttgggtgctgccgtcgtggccgttgcagtcctggtcattggtgtcaccctttacagacggagccagagtgactatggcgtggacgtcattgactcttctgcattgacaggtggcttccagaccttcaacttcaaaacagtccgtcaaggtaactccctgctcctgaattctgccatgcagccagatctgacagtgagccggacatacagcggacccatctgtctgcaggaccctctggacaaggagctcatgacagagtcctcactctttaaccctttgtcggacatcaaagtgaaagtccagagctcgttcatggtttccctgggagtgtctgagagagctgagtaccacggcaagaatcattccaggacttttccccatggaaacaaccacagctttagtacaatgcatcccagaaataaaatgccctacatccaaaatctgtcatcactccccacaaggacagaactgaggacaactggtgtctttggccatttaggggggcgcttagtaatgccaaatacaggggtgagcttactcataccacacggtgccatcccagaggagaattcttgggagatttatatgtccatcaaccaaggtgaacccagtgaaaatccagcaaacaaaggatcaaatagcttgttgaagaacacatatgccattgggggaaaaataagcagacatctgggttcttctcgctga

SEQ ID NO: 130 - protein, 563 aa, Homo sapiens
MGRAAATAGGGGGARRWLPWLGLCFWAAGTAAARGTDNGEALPESIPSAPGTLPHFIEEPDDAYIIKSNPIALRCKARPAMQIFFKCNGEWVHQNEHVSEETLDESSGLKVREVFINVTRQQVEDFHGPEDYWCQCVAWSHLGTSKSRKASVRIAYLRKNFEQDPQGREVPIEGMIVLHCRPPEGVPAAEVEWLKNEEPIDSEQDENIDTRADHNLIIRQARLSDSGNYTCMAANIVAKRRSLSATVVVYVDGSWEVWSEWSVCSPECEHLRIRECTAPPPRNGGKFCEGLSQESENCTDGLCILDKKPLHEIKPQSIENASDIALYSGLGAAVVAVAVLVIGVTLYRRSQSDYGVDVIDSSALTGGFQTFNFKTVRQGNSLLLNSAMQPDLTVSRTYSGPICLQDPLDKELMTESSLFNPLSDIKVKVQSSFMVSLGVSERAEYHGKNHSRTFPHGNNHSFSTMHPRNKMPYIQNLSSLPTRTELRTTGVFGHLGGRLVMPNTGVSLLIPHGAIPEENSWEIYMSINQGEPSENPANKGSNSLLKNTYAIGGKISRHLGSSR

SEQ ID NO: 131 - DNA, 1659 bp, Homo sapiens
  CDS (1)...(1659)
atggggagagcggcggccaccgcaggcggcggcggaggggcgcgccgctggctcccgtggctggggctgtgcttctgggcggcagggaccgcggctgcccgaggaactgacaatggcgaagcccttcccgaatccatcccatcagctcctgggacactgcctcatttcatagaggagccagatgatgcttatattatcaagagcaaccctattgcactcaggtgcaaagcgaggccagccatgcagatattcttcaaatgcaacggcgagtgggtccatcagaacgagcacgtctctgaagagactctggacgagagctcaggtttgaaggtccgcgaagtgttcatcaatgttactaggcaacaggtggaggacttccatgggcccgaggactattggtgccagtgtgtggcgtggagccacctgggtacctccaagagcaggaaggcctctgtgcgcatagcctatttacggaaaaactttgaacaagacccacaaggaagggaagttcccattgaaggcatgattgtactgcactgccgcccaccagagggagtccctgctgccgaggtggaatggctgaaaaatgaagagcccattgactctgaacaagacgagaacattgacaccagggctgaccataacctgatcatcaggcaggcacggctctcggactcaggaaattacacctgcatggcagccaacatcgtggctaagaggagaagcctgtcggccactgttgtggtctacgtggatgggagctgggaagtgtggagcgaatggtccgtctgcagtccagagtgtgaacatttgcggatccgggagtgcacagcaccacccccgagaaatgggggcaaattctgtgaaggtctaagccaggaatctgaaaactgcacagatggtctttgcatcctaggcattgagaatgccagcgacattgctttgtactcgggcttgggtgctgccgtcgtggccgttgcagtcctggtcattggtgtcaccctttacagacggagccagagtgactatggcgtggacgtcattgactcttctgcattgacaggtggcttccagaccttcaacttcaaaacagtccgtcaaggtaactccctgctcctgaattctgccatgcagccagatctgacagtgagccggacatacagcggacccatctgtctgcaggaccctctggacaaggagctcatgacagagtcctcactctttaaccctttgtcggacatcaaagtgaaagtccagagctcgttcatggtttccctgggagtgtctgagagagctgagtaccacggcaagaatcattccaggacttttccccatggaaacaaccacagctttagtacaatgcatcccagaaataaaatgccctacatccaaaatctgtcatcactccccacaaggacagaactgaggacaactggtgtctttggccatttaggggggcgcttagtaatgccaaatacaggggtgagcttactcataccacacggtgccatcccagaggagaattcttgggagatttatatgtccatcaaccaaggtgaacccagtgaaaatccagcaaacaaaggatcaaatagcttgttgaagaacacatatgccattgggggaaaaataagcagacatctgggttcttctcgctga

SEQ ID NO: 132 - protein, 552 aa, Homo sapiens
MGRAAATAGGGGGARRWLPWLGLCFWAAGTAAARGTDNGEALPESIPSAPGTLPHFIEEPDDAYIIKSNPIALRCKARPAMQIFFKCNGEWVHQNEHVSEETLDESSGLKVREVFINVTRQQVEDFHGPEDYWCQCVAWSHLGTSKSRKASVRIAYLRKNFEQDPQGREVPIEGMIVLHCRPPEGVPAAEVEWLKNEEPIDSEQDENIDTRADHNLIIRQARLSDSGNYTCMAANIVAKRRSLSATVVVYVDGSWEVWSEWSVCSPECEHLRIRECTAPPPRNGGKFCEGLSQESENCTDGLCILGIENASDIALYSGLGAAVVAVAVLVIGVTLYRRSQSDYGVDVIDSSALTGGFQTFNFKTVRQGNSLLLNSAMQPDLTVSRTYSGPICLQDPLDKELMTESSLFNPLSDIKVKVQSSFMVSLGVSERAEYHGKNHSRTFPHGNNHSFSTMHPRNKMPYIQNLSSLPTRTELRTTGVFGHLGGRLVMPNTGVSLLIPHGAIPEENSWEIYMSINQGEPSENPANKGSNSLLKNTYAIGGKISRHLGSSR

SEQ ID NO: 133 - DNA, 2736 bp, Homo sapiens
  CDS (1)...(2736)
atggggagagcggcggccaccgcaggcggcggcggaggggcgcgccgctggctcccgtggctggggctgtgcttctgggcggcagggaccgcggctgcccgaggaactgacaatggcgaagcccttcccgaatccatcccatcagctcctgggacactgcctcatttcatagaggagccagatgatgcttatattatcaagagcaaccctattgcactcaggtgcaaagcgaggccagccatgcagatattcttcaaatgcaacggcgagtgggtccatcagaacgagcacgtctctgaagagactctggacgagagctcaggtttgaaggtccgcgaagtgttcatcaatgttactaggcaacaggtggaggacttccatgggcccgaggactattggtgccagtgtgtggcgtggagccacctgggtacctccaagagcaggaaggcctctgtgcgcatagcctatttacggaaaaactttgaacaagacccacaaggaagggaagttcccattgaaggcatgattgtactgcactgccgcccaccagagggagtccctgctgccgaggtggaatggctgaaaaatgaagagcccattgactctgaacaagacgagaacattgacaccagggctgaccataacctgatcatcaggcaggcacggctctcggactcaggaaattacacctgcatggcagccaacatcgtggctaagaggagaagcctgtcggccactgttgtggtctacgtggatgggagctgggaagtgtggagcgaatggtccgtctgcagtccagagtgtgaacatttgcggatccgggagtgcacagcaccacccccgagaaatgggggcaaattctgtgaaggtctaagccaggaatctgaaaactgcacagatggtctttgcatcctagataaaaaacctcttcatgaaataaaaccccaaagcattgagaatgccagcgacattgctttgtactcgggcttgggtgctgccgtcgtggccgttgcagtcctggtcattggtgtcaccctttacagacggagccagagtgactatggcgtggacgtcattgactcttctgcattgacaggtggcttccagaccttcaacttcaaaacagtccgtcaagccaagaatatcatggaactaatgatacaagaaaaatcctttggtaactccctgctcctgaattctgccatgcagccagatctgacagtgagccggacatacagcggacccatctgtctgcaggaccctctggacaaggagctcatgacagagtcctcactctttaaccctttgtcggacatcaaagtgaaagtccagagctcgttcatggtttccctgggagtgtctgagagagctgagtaccacggcaagaatcattccaggacttttccccatggaaacaaccacagctttagtacaatgcatcccagaaataaaatgccctacatccaaaatctgtcatcactccccacaaggacagaactgaggacaactggtgtctttggccatttaggggggcgcttagtaatgccaaatacaggggtgagcttactcataccacacggtgccatcccagaggagaattcttgggagatttatatgtccatcaaccaaggtgaacccagcctccagtcagatggctctgaggtgctcctgagtcctgaagtcacctgtggtcctccagacatgatcgtcaccactccctttgcattgaccatcccgcactgtgcagatgtcagttctgagcattggaatatccatttaaagaagaggacacagcagggcaaatgggaggaagtgatgtcagtggaagatgaatctacatcctgttactgccttttggacccctttgcgtgtcatgtgctcctggacagctttgggacctatgcgctcactggagagccaatcacagactgtgccgtgaagcaactgaaggtggcggtttttggctgcatgtcctgtaactccctggattacaacttgagagtttactgtgtggacaataccccttgtgcatttcaggaagtggtttcagatgaaaggcatcaaggtggacagctcctggaagaaccaaaattgctgcatttcaaagggaatacctttagtcttcagatttctgtccttgatattcccccattcctctggagaattaaaccattcactgcctgccaggaagtcccgttctcccgcgtgtggtgcagtaaccggcagcccctgcactgtgccttctccctggagcgttatacgcccactaccacccagctgtcctgcaaaatctgcattcggcagctcaaaggccatgaacagatcctccaagtgcagacatcaatcctagagagtgaacgagaaaccatcactttcttcgcacaagaggacagcactttccctgcacagactggccccaaagccttcaaaattccctactccatcagacagcggatttgtgctacatttgatacccccaatgccaaaggcaaggactggcagatgttagcacagaaaaacagcatcaacaggaatttatcttatttcgctacacaaagtagcccatctgctgtcattttgaacctgtgggaagctcgtcatcagcatgatggtgatcttgactccctggcctgtgcccttgaagagattgggaggacacacacgaaactctcaaacatttcagaatcccagcttgatgaagccgacttcaactacagcaggcaaaatggactctag

SEQ ID NO: 134 - protein, 911 aa, Homo sapiens
MGRAAATAGGGGGARRWLPWLGLCFWAAGTAAARGTDNGEALPESIPSAPGTLPHFIEEPDDAYIIKSNPIALRCKARPAMQIFFKCNGEWVHQNEHVSEETLDESSGLKVREVFINVTRQQVEDFHGPEDYWCQCVAWSHLGTSKSRKASVRIAYLRKNFEQDPQGREVPIEGMIVLHCRPPEGVPAAEVEWLKNEEPIDSEQDENIDTRADHNLIIRQARLSDSGNYTCMAANIVAKRRSLSATVVVYVDGSWEVWSEWSVCSPECEHLRIRECTAPPPRNGGKFCEGLSQESENCTDGLCILDKKPLHEIKPQSIENASDIALYSGLGAAVVAVAVLVIGVTLYRRSQSDYGVDVIDSSALTGGFQTFNFKTVRQAKNIMELMIQEKSFGNSLLLNSAMQPDLTVSRTYSGPICLQDPLDKELMTESSLFNPLSDIKVKVQSSFMVSLGVSERAEYHGKNHSRTFPHGNNHSFSTMHPRNKMPYIQNLSSLPTRTELRTTGVFGHLGGRLVMPNTGVSLLIPHGAIPEENSWEIYMSINQGEPSLQSDGSEVLLSPEVTCGPPDMIVTTPFALTIPHCADVSSEHWNIHLKKRTQQGKWEEVMSVEDESTSCYCLLDPFACHVLLDSFGTYALTGEPITDCAVKQLKVAVFGCMSCNSLDYNLRVYCVDNTPCAFQEVVSDERHQGGQLLEEPKLLHFKGNTFSLQISVLDIPPFLWRIKPFTACQEVPFSRVWCSNRQPLHCAFSLERYTPTTTQLSCKICIRQLKGHEQILQVQTSILESERETITFFAQEDSTFPAQTGPKAFKIPYSIRQRICATFDTPNAKGKDWQMLAQKNSINRNLSYFATQSSPSAVILNLWEARHQHDGDLDSLACALEEIGRTHTKLSNISESQLDEADFNYSRQNGL

SEQ ID NO: 135 - DNA, 2703 bp, Homo sapiens
  CDS (1)...(2703)
atggggagagcggcggccaccgcaggcggcggcggaggggcgcgccgctggctcccgtggctggggctgtgcttctgggcggcagggaccgcggctgcccgaggaactgacaatggcgaagcccttcccgaatccatcccatcagctcctgggacactgcctcatttcatagaggagccagatgatgcttatattatcaagagcaaccctattgcactcaggtgcaaagcgaggccagccatgcagatattcttcaaatgcaacggcgagtgggtccatcagaacgagcacgtctctgaagagactctggacgagagctcaggtttgaaggtccgcgaagtgttcatcaatgttactaggcaacaggtggaggacttccatgggcccgaggactattggtgccagtgtgtggcgtggagccacctgggtacctccaagagcaggaaggcctctgtgcgcatagcctatttacggaaaaactttgaacaagacccacaaggaagggaagttcccattgaaggcatgattgtactgcactgccgcccaccagagggagtccctgctgccgaggtggaatggctgaaaaatgaagagcccattgactctgaacaagacgagaacattgacaccagggctgaccataacctgatcatcaggcaggcacggctctcggactcaggaaattacacctgcatggcagccaacatcgtggctaagaggagaagcctgtcggccactgttgtggtctacgtggatgggagctgggaagtgtggagcgaatggtccgtctgcagtccagagtgtgaacatttgcggatccgggagtgcacagcaccacccccgagaaatgggggcaaattctgtgaaggtctaagccaggaatctgaaaactgcacagatggtctttgcatcctaggcattgagaatgccagcgacattgctttgtactcgggcttgggtgctgccgtcgtggccgttgcagtcctggtcattggtgtcaccctttacagacggagccagagtgactatggcgtggacgtcattgactcttctgcattgacaggtggcttccagaccttcaacttcaaaacagtccgtcaagccaagaatatcatggaactaatgatacaagaaaaatcctttggtaactccctgctcctgaattctgccatgcagccagatctgacagtgagccggacatacagcggacccatctgtctgcaggaccctctggacaaggagctcatgacagagtcctcactctttaaccctttgtcggacatcaaagtgaaagtccagagctcgttcatggtttccctgggagtgtctgagagagctgagtaccacggcaagaatcattccaggacttttccccatggaaacaaccacagctttagtacaatgcatcccagaaataaaatgccctacatccaaaatctgtcatcactccccacaaggacagaactgaggacaactggtgtctttggccatttaggggggcgcttagtaatgccaaatacaggggtgagcttactcataccacacggtgccatcccagaggagaattcttgggagatttatatgtccatcaaccaaggtgaacccagcctccagtcagatggctctgaggtgctcctgagtcctgaagtcacctgtggtcctccagacatgatcgtcaccactccctttgcattgaccatcccgcactgtgcagatgtcagttctgagcattggaatatccatttaaagaagaggacacagcagggcaaatgggaggaagtgatgtcagtggaagatgaatctacatcctgttactgccttttggacccctttgcgtgtcatgtgctcctggacagctttgggacctatgcgctcactggagagccaatcacagactgtgccgtgaagcaactgaaggtggcggtttttggctgcatgtcctgtaactccctggattacaacttgagagtttactgtgtggacaataccccttgtgcatttcaggaagtggtttcagatgaaaggcatcaaggtggacagctcctggaagaaccaaaattgctgcatttcaaagggaatacctttagtcttcagatttctgtccttgatattcccccattcctctggagaattaaaccattcactgcctgccaggaagtcccgttctcccgcgtgtggtgcagtaaccggcagcccctgcactgtgccttctccctggagcgttatacgcccactaccacccagctgtcctgcaaaatctgcattcggcagctcaaaggccatgaacagatcctccaagtgcagacatcaatcctagagagtgaacgagaaaccatcactttcttcgcacaagaggacagcactttccctgcacagactggccccaaagccttcaaaattccctactccatcagacagcggatttgtgctacatttgatacccccaatgccaaaggcaaggactggcagatgttagcacagaaaaacagcatcaacaggaatttatcttatttcgctacacaaagtagcccatctgctgtcattttgaacctgtgggaagctcgtcatcagcatgatggtgatcttgactccctggcctgtgcccttgaagagattgggaggacacacacgaaactctcaaacatttcagaatcccagcttgatgaagccgacttcaactacagcaggcaaaatggactctag

SEQ ID NO: 136 - protein, 900 aa, Homo sapiens
MGRAAATAGGGGGARRWLPWLGLCFWAAGTAAARGTDNGEALPESIPSAPGTLPHFIEEPDDAYIIKSNPIALRCKARPAMQIFFKCNGEWVHQNEHVSEETLDESSGLKVREVFINVTRQQVEDFHGPEDYWCQCVAWSHLGTSKSRKASVRIAYLRKNFEQDPQGREVPIEGMIVLHCRPPEGVPAAEVEWLKNEEPIDSEQDENIDTRADHNLIIRQARLSDSGNYTCMAANIVAKRRSLSATVVVYVDGSWEVWSEWSVCSPECEHLRIRECTAPPPRNGGKFCEGLSQESENCTDGLCILGIENASDIALYSGLGAAVVAVAVLVIGVTLYRRSQSDYGVDVIDSSALTGGFQTFNFKTVRQAKNIMELMIQEKSFGNSLLLNSAMQPDLTVSRTYSGPICLQDPLDKELMTESSLFNPLSDIKVKVQSSFMVSLGVSERAEYHGKNHSRTFPHGNNHSFSTMHPRNKMPYIQNLSSLPTRTELRTTGVFGHLGGRLVMPNTGVSLLIPHGAIPEENSWEIYMSINQGEPSLQSDGSEVLLSPEVTCGPPDMIVTTPFALTIPHCADVSSEHWNIHLKKRTQQGKWEEVMSVEDESTSCYCLLDPFACHVLLDSFGTYALTGEPITDCAVKQLKVAVFGCMSCNSLDYNLRVYCVDNTPCAFQEVVSDERHQGGQLLEEPKLLHFKGNTFSLQISVLDIPPFLWRIKPFTACQEVPFSRVWCSNRQPLHCAFSLERYTPTTTQLSCKICIRQLKGHEQILQVQTSILESERETITFFAQEDSTFPAQTGPKAFKIPYSIRQRICATFDTPNAKGKDWQMLAQKNSINRNLSYFATQSSPSAVILNLWEARHQHDGDLDSLACALEEIGRTHTKLSNISESQLDEADFNYSRQNGL

SEQ ID NO: 137 - DNA, 2694 bp, Homo sapiens
  CDS (1)...(2694)
atggggagagcggcggccaccgcaggcggcggcggaggggcgcgccgctggctcccgtggctggggctgtgcttctgggcggcagggaccgcggctgcccgaggaactgacaatggcgaagcccttcccgaatccatcccatcagctcctgggacactgcctcatttcatagaggagccagatgatgcttatattatcaagagcaaccctattgcactcaggtgcaaagcgaggccagccatgcagatattcttcaaatgcaacggcgagtgggtccatcagaacgagcacgtctctgaagagactctggacgagagctcaggtttgaaggtccgcgaagtgttcatcaatgttactaggcaacaggtggaggacttccatgggcccgaggactattggtgccagtgtgtggcgtggagccacctgggtacctccaagagcaggaaggcctctgtgcgcatagcctatttacggaaaaactttgaacaagacccacaaggaagggaagttcccattgaaggcatgattgtactgcactgccgcccaccagagggagtccctgctgccgaggtggaatggctgaaaaatgaagagcccattgactctgaacaagacgagaacattgacaccagggctgaccataacctgatcatcaggcaggcacggctctcggactcaggaaattacacctgcatggcagccaacatcgtggctaagaggagaagcctgtcggccactgttgtggtctacgtggatgggagctgggaagtgtggagcgaatggtccgtctgcagtccagagtgtgaacatttgcggatccgggagtgcacagcaccacccccgagaaatgggggcaaattctgtgaaggtctaagccaggaatctgaaaactgcacagatggtctttgcatcctagataaaaaacctcttcatgaaataaaaccccaaagcattgagaatgccagcgacattgctttgtactcgggcttgggtgctgccgtcgtggccgttgcagtcctggtcattggtgtcaccctttacagacggagccagagtgactatggcgtggacgtcattgactcttctgcattgacaggtggcttccagaccttcaacttcaaaacagtccgtcaaggtaactccctgctcctgaattctgccatgcagccagatctgacagtgagccggacatacagcggacccatctgtctgcaggaccctctggacaaggagctcatgacagagtcctcactctttaaccctttgtcggacatcaaagtgaaagtccagagctcgttcatggtttccctgggagtgtctgagagagctgagtaccacggcaagaatcattccaggacttttccccatggaaacaaccacagctttagtacaatgcatcccagaaataaaatgccctacatccaaaatctgtcatcactccccacaaggacagaactgaggacaactggtgtctttggccatttaggggggcgcttagtaatgccaaatacaggggtgagcttactcataccacacggtgccatcccagaggagaattcttgggagatttatatgtccatcaaccaaggtgaacccagcctccagtcagatggctctgaggtgctcctgagtcctgaagtcacctgtggtcctccagacatgatcgtcaccactccctttgcattgaccatcccgcactgtgcagatgtcagttctgagcattggaatatccatttaaagaagaggacacagcagggcaaatgggaggaagtgatgtcagtggaagatgaatctacatcctgttactgccttttggacccctttgcgtgtcatgtgctcctggacagctttgggacctatgcgctcactggagagccaatcacagactgtgccgtgaagcaactgaaggtggcggtttttggctgcatgtcctgtaactccctggattacaacttgagagtttactgtgtggacaataccccttgtgcatttcaggaagtggtttcagatgaaaggcatcaaggtggacagctcctggaagaaccaaaattgctgcatttcaaagggaatacctttagtcttcagatttctgtccttgatattcccccattcctctggagaattaaaccattcactgcctgccaggaagtcccgttctcccgcgtgtggtgcagtaaccggcagcccctgcactgtgccttctccctggagcgttatacgcccactaccacccagctgtcctgcaaaatctgcattcggcagctcaaaggccatgaacagatcctccaagtgcagacatcaatcctagagagtgaacgagaaaccatcactttcttcgcacaagaggacagcactttccctgcacagactggccccaaagccttcaaaattccctactccatcagacagcggatttgtgctacatttgatacccccaatgccaaaggcaaggactggcagatgttagcacagaaaaacagcatcaacaggaatttatcttatttcgctacacaaagtagcccatctgctgtcattttgaacctgtgggaagctcgtcatcagcatgatggtgatcttgactccctggcctgtgcccttgaagagattgggaggacacacacgaaactctcaaacatttcagaatcccagcttgatgaagccgacttcaactacagcaggcaaaatggactctag

SEQ ID NO: 138 - protein, 897 aa, Homo sapiens
MGRAAATAGGGGGARRWLPWLGLCFWAAGTAAARGTDNGEALPESIPSAPGTLPHFIEEPDDAYIIKSNPIALRCKARPAMQIFFKCNGEWVHQNEHVSEETLDESSGLKVREVFINVTRQQVEDFHGPEDYWCQCVAWSHLGTSKSRKASVRIAYLRKNFEQDPQGREVPIEGMIVLHCRPPEGVPAAEVEWLKNEEPIDSEQDENIDTRADHNLIIRQARLSDSGNYTCMAANIVAKRRSLSATVVVYVDGSWEVWSEWSVCSPECEHLRIRECTAPPPRNGGKFCEGLSQESENCTDGLCILDKKPLHEIKPQSIENASDIALYSGLGAAVVAVAVLVIGVTLYRRSQSDYGVDVIDSSALTGGFQTFNFKTVRQGNSLLLNSAMQPDLTVSRTYSGPICLQDPLDKELMTESSLFNPLSDIKVKVQSSFMVSLGVSERAEYHGKNHSRTFPHGNNHSFSTMHPRNKMPYIQNLSSLPTRTELRTTGVFGHLGGRLVMPNTGVSLLIPHGAIPEENSWEIYMSINQGEPSLQSDGSEVLLSPEVTCGPPDMIVTTPFALTIPHCADVSSEHWNIHLKKRTQQGKWEEVMSVEDESTSCYCLLDPFACHVLLDSFGTYALTGEPITDCAVKQLKVAVFGCMSCNSLDYNLRVYCVDNTPCAFQEVVSDERHQGGQLLEEPKLLHFKGNTFSLQISVLDIPPFLWRIKPFTACQEVPFSRVWCSNRQPLHCAFSLERYTPTTTQLSCKICIRQLKGHEQILQVQTSILESERETITFFAQEDSTFPAQTGPKAFKIPYSIRQRICATFDTPNAKGKDWQMLAQKNSINRNLSYFATQSSPSAVILNLWEARHQHDGDLDSLACALEEIGRTHTKLSNISESQLDEADFNYSRQNGL

SEQ ID NO: 139 - DNA, 2661 bp, Homo sapiens
  CDS (1)...(2661)
atggggagagcggcggccaccgcaggcggcggcggaggggcgcgccgctggctcccgtggctggggctgtgcttctgggcggcagggaccgcggctgcccgaggaactgacaatggcgaagcccttcccgaatccatcccatcagctcctgggacactgcctcatttcatagaggagccagatgatgcttatattatcaagagcaaccctattgcactcaggtgcaaagcgaggccagccatgcagatattcttcaaatgcaacggcgagtgggtccatcagaacgagcacgtctctgaagagactctggacgagagctcaggtttgaaggtccgcgaagtgttcatcaatgttactaggcaacaggtggaggacttccatgggcccgaggactattggtgccagtgtgtggcgtggagccacctgggtacctccaagagcaggaaggcctctgtgcgcatagcctatttacggaaaaactttgaacaagacccacaaggaagggaagttcccattgaaggcatgattgtactgcactgccgcccaccagagggagtccctgctgccgaggtggaatggctgaaaaatgaagagcccattgactctgaacaagacgagaacattgacaccagggctgaccataacctgatcatcaggcaggcacggctctcggactcaggaaattacacctgcatggcagccaacatcgtggctaagaggagaagcctgtcggccactgttgtggtctacgtggatgggagctgggaagtgtggagcgaatggtccgtctgcagtccagagtgtgaacatttgcggatccgggagtgcacagcaccacccccgagaaatgggggcaaattctgtgaaggtctaagccaggaatctgaaaactgcacagatggtctttgcatcctaggcattgagaatgccagcgacattgctttgtactcgggcttgggtgctgccgtcgtggccgttgcagtcctggtcattggtgtcaccctttacagacggagccagagtgactatggcgtggacgtcattgactcttctgcattgacaggtggcttccagaccttcaacttcaaaacagtccgtcaaggtaactccctgctcctgaattctgccatgcagccagatctgacagtgagccggacatacagcggacccatctgtctgcaggaccctctggacaaggagctcatgacagagtcctcactctttaaccctttgtcggacatcaaagtgaaagtccagagctcgttcatggtttccctgggagtgtctgagagagctgagtaccacggcaagaatcattccaggacttttccccatggaaacaaccacagctttagtacaatgcatcccagaaataaaatgccctacatccaaaatctgtcatcactccccacaaggacagaactgaggacaactggtgtctttggccatttaggggggcgcttagtaatgccaaatacaggggtgagcttactcataccacacggtgccatcccagaggagaattcttgggagatttatatgtccatcaaccaaggtgaacccagcctccagtcagatggctctgaggtgctcctgagtcctgaagtcacctgtggtcctccagacatgatcgtcaccactccctttgcattgaccatcccgcactgtgcagatgtcagttctgagcattggaatatccatttaaagaagaggacacagcagggcaaatgggaggaagtgatgtcagtggaagatgaatctacatcctgttactgccttttggacccctttgcgtgtcatgtgctcctggacagctttgggacctatgcgctcactggagagccaatcacagactgtgccgtgaagcaactgaaggtggcggtttttggctgcatgtcctgtaactccctggattacaacttgagagtttactgtgtggacaataccccttgtgcatttcaggaagtggtttcagatgaaaggcatcaaggtggacagctcctggaagaaccaaaattgctgcatttcaaagggaatacctttagtcttcagatttctgtccttgatattcccccattcctctggagaattaaaccattcactgcctgccaggaagtcccgttctcccgcgtgtggtgcagtaaccggcagcccctgcactgtgccttctccctggagcgttatacgcccactaccacccagctgtcctgcaaaatctgcattcggcagctcaaaggccatgaacagatcctccaagtgcagacatcaatcctagagagtgaacgagaaaccatcactttcttcgcacaagaggacagcactttccctgcacagactggccccaaagccttcaaaattccctactccatcagacagcggatttgtgctacatttgatacccccaatgccaaaggcaaggactggcagatgttagcacagaaaaacagcatcaacaggaatttatcttatttcgctacacaaagtagcccatctgctgtcattttgaacctgtgggaagctcgtcatcagcatgatggtgatcttgactccctggcctgtgcccttgaagagattgggaggacacacacgaaactctcaaacatttcagaatcccagcttgatgaagccgacttcaactacagcaggcaaaatggactctag

SEQ ID NO: 140 - protein, 886 aa, Homo sapiens
MGRAAATAGGGGGARRWLPWLGLCFWAAGTAAARGTDNGEALPESIPSAPGTLPHFIEEPDDAYIIKSNPIALRCKARPAMQIFFKCNGEWVHQNEHVSEETLDESSGLKVREVFINVTRQQVEDFHGPEDYWCQCVAWSHLGTSKSRKASVRIAYLRKNFEQDPQGREVPIEGMIVLHCRPPEGVPAAEVEWLKNEEPIDSEQDENIDTRADHNLIIRQARLSDSGNYTCMAANIVAKRRSLSATVVVYVDGSWEVWSEWSVCSPECEHLRIRECTAPPPRNGGKFCEGLSQESENCTDGLCILGIENASDIALYSGLGAAVVAVAVLVIGVTLYRRSQSDYGVDVIDSSALTGGFQTFNFKTVRQGNSLLLNSAMQPDLTVSRTYSGPICLQDPLDKELMTESSLFNPLSDIKVKVQSSFMVSLGVSERAEYHGKNHSRTFPHGNNHSFSTMHPRNKMPYIQNLSSLPTRTELRTTGVFGHLGGRLVMPNTGVSLLIPHGAIPEENSWEIYMSINQGEPSLQSDGSEVLLSPEVTCGPPDMIVTTPFALTIPHCADVSSEHWNIHLKKRTQQGKWEEVMSVEDESTSCYCLLDPFACHVLLDSFGTYALTGEPITDCAVKQLKVAVFGCMSCNSLDYNLRVYCVDNTPCAFQEVVSDERHQGGQLLEEPKLLHFKGNTFSLQISVLDIPPFLWRIKPFTACQEVPFSRVWCSNRQPLHCAFSLERYTPTTTQLSCKICIRQLKGHEQILQVQTSILESERETITFFAQEDSTFPAQTGPKAFKIPYSIRQRICATFDTPNAKGKDWQMLAQKNSINRNLSYFATQSSPSAVILNLWEARHQHDGDLDSLACALEEIGRTHTKLSNISESQLDEADFNYSRQNGL

SEQ ID NO: 141 - DNA, 1041 bp, Homo sapiens
  CDS (1)...(1041)
atggcagccaacatcgtggctaagaggagaagcctgtcggccactgttgtggtctacgtggatgggagctgggaagtgtggagcgaatggtccgtctgcagtccagagtgtgaacatttgcggatccgggagtgcacagcaccacccccgagaaatgggggcaaattctgtgaaggtctaagccaggaatctgaaaactgcacagatggtctttgcatcctagataaaaaacctcttcatgaaataaaaccccaaagcattgagaatgccagcgacattgctttgtactcgggcttgggtgctgccgtcgtggccgttgcagtcctggtcattggtgtcaccctttacagacggagccagagtgactatggcgtggacgtcattgactcttctgcattgacaggtggcttccagaccttcaacttcaaaacagtccgtcaagccaagaatatcatggaactaatgatacaagaaaaatcctttggtaactccctgctcctgaattctgccatgcagccagatctgacagtgagccggacatacagcggacccatctgtctgcaggaccctctggacaaggagctcatgacagagtcctcactctttaaccctttgtcggacatcaaagtgaaagtccagagctcgttcatggtttccctgggagtgtctgagagagctgagtaccacggcaagaatcattccaggacttttccccatggaaacaaccacagctttagtacaatgcatcccagaaataaaatgccctacatccaaaatctgtcatcactccccacaaggacagaactgaggacaactggtgtctttggccatttaggggggcgcttagtaatgccaaatacaggggtgagcttactcataccacacggtgccatcccagaggagaattcttgggagatttatatgtccatcaaccaaggtgaacccagtgaaaatccagcaaacaaaggatcaaatagcttgttgaagaacacatatgccattgggggaaaaataagcagacatctgggttcttctcgctga

SEQ ID NO: 142 - protein, 346 aa, Homo sapiens
MAANIVAKRRSLSATVVVYVDGSWEVWSEWSVCSPECEHLRIRECTAPPPRNGGKFCEGLSQESENCTDGLCILDKKPLHEIKPQSIENASDIALYSGLGAAVVAVAVLVIGVTLYRRSQSDYGVDVIDSSALTGGFQTFNFKTVRQAKNIMELMIQEKSFGNSLLLNSAMQPDLTVSRTYSGPICLQDPLDKELMTESSLFNPLSDIKVKVQSSFMVSLGVSERAEYHGKNHSRTFPHGNNHSFSTMHPRNKMPYIQNLSSLPTRTELRTTGVFGHLGGRLVMPNTGVSLLIPHGAIPEENSWEIYMSINQGEPSENPANKGSNSLLKNTYAIGGKISRHLGSSR

SEQ ID NO: 143 - DNA, 1008 bp, Homo sapiens
  CDS (1)...(1008)
atggcagccaacatcgtggctaagaggagaagcctgtcggccactgttgtggtctacgtggatgggagctgggaagtgtggagcgaatggtccgtctgcagtccagagtgtgaacatttgcggatccgggagtgcacagcaccacccccgagaaatgggggcaaattctgtgaaggtctaagccaggaatctgaaaactgcacagatggtctttgcatcctaggcattgagaatgccagcgacattgctttgtactcgggcttgggtgctgccgtcgtggccgttgcagtcctggtcattggtgtcaccctttacagacggagccagagtgactatggcgtggacgtcattgactcttctgcattgacaggtggcttccagaccttcaacttcaaaacagtccgtcaagccaagaatatcatggaactaatgatacaagaaaaatcctttggtaactccctgctcctgaattctgccatgcagccagatctgacagtgagccggacatacagcggacccatctgtctgcaggaccctctggacaaggagctcatgacagagtcctcactctttaaccctttgtcggacatcaaagtgaaagtccagagctcgttcatggtttccctgggagtgtctgagagagctgagtaccacggcaagaatcattccaggacttttccccatggaaacaaccacagctttagtacaatgcatcccagaaataaaatgccctacatccaaaatctgtcatcactccccacaaggacagaactgaggacaactggtgtctttggccatttaggggggcgcttagtaatgccaaatacaggggtgagcttactcataccacacggtgccatcccagaggagaattcttgggagatttatatgtccatcaaccaaggtgaacccagtgaaaatccagcaaacaaaggatcaaatagcttgttgaagaacacatatgccattgggggaaaaataagcagacatctgggttcttctcgctga

SEQ ID NO: 144 - protein, 335 aa, Homo sapiens
MAANIVAKRRSLSATVVVYVDGSWEVWSEWSVCSPECEHLRIRECTAPPPRNGGKFCEGLSQESENCTDGLCILGIENASDIALYSGLGAAVVAVAVLVIGVTLYRRSQSDYGVDVIDSSALTGGFQTFNFKTVRQAKNIMELMIQEKSFGNSLLLNSAMQPDLTVSRTYSGPICLQDPLDKELMTESSLFNPLSDIKVKVQSSFMVSLGVSERAEYHGKNHSRTFPHGNNHSFSTMHPRNKMPYIQNLSSLPTRTELRTTGVFGHLGGRLVMPNTGVSLLIPHGAIPEENSWEIYMSINQGEPSENPANKGSNSLLKNTYAIGGKISRHLGSSR

SEQ ID NO: 145 - DNA, 999 bp, Homo sapiens
  CDS (1)...(999)
atggcagccaacatcgtggctaagaggagaagcctgtcggccactgttgtggtctacgtggatgggagctgggaagtgtggagcgaatggtccgtctgcagtccagagtgtgaacatttgcggatccgggagtgcacagcaccacccccgagaaatgggggcaaattctgtgaaggtctaagccaggaatctgaaaactgcacagatggtctttgcatcctagataaaaaacctcttcatgaaataaaaccccaaagcattgagaatgccagcgacattgctttgtactcgggcttgggtgctgccgtcgtggccgttgcagtcctggtcattggtgtcaccctttacagacggagccagagtgactatggcgtggacgtcattgactcttctgcattgacaggtggcttccagaccttcaacttcaaaacagtccgtcaaggtaactccctgctcctgaattctgccatgcagccagatctgacagtgagccggacatacagcggacccatctgtctgcaggaccctctggacaaggagctcatgacagagtcctcactctttaaccctttgtcggacatcaaagtgaaagtccagagctcgttcatggtttccctgggagtgtctgagagagctgagtaccacggcaagaatcattccaggacttttccccatggaaacaaccacagctttagtacaatgcatcccagaaataaaatgccctacatccaaaatctgtcatcactccccacaaggacagaactgaggacaactggtgtctttggccatttaggggggcgcttagtaatgccaaatacaggggtgagcttactcataccacacggtgccatcccagaggagaattcttgggagatttatatgtccatcaaccaaggtgaacccagtgaaaatccagcaaacaaaggatcaaatagcttgttgaagaacacatatgccattgggggaaaaataagcagacatctgggttcttctcgctga

SEQ ID NO: 146 - protein, 332 aa, Homo sapiens
MAANIVAKRRSLSATVVVYVDGSWEVWSEWSVCSPECEHLRIRECTAPPPRNGGKFCEGLSQESENCTDGLCILDKKPLHEIKPQSIENASDIALYSGLGAAVVAVAVLVIGVTLYRRSQSDYGVDVIDSSALTGGFQTFNFKTVRQGNSLLLNSAMQPDLTVSRTYSGPICLQDPLDKELMTESSLFNPLSDIKVKVQSSFMVSLGVSERAEYHGKNHSRTFPHGNNHSFSTMHPRNKMPYIQNLSSLPTRTELRTTGVFGHLGGRLVMPNTGVSLLIPHGAIPEENSWEIYMSINQGEPSENPANKGSNSLLKNTYAIGGKISRHLGSSR

SEQ ID NO: 147 - DNA, 966 bp, Homo sapiens
  CDS (1)...(966)
atggcagccaacatcgtggctaagaggagaagcctgtcggccactgttgtggtctacgtggatgggagctgggaagtgtggagcgaatggtccgtctgcagtccagagtgtgaacatttgcggatccgggagtgcacagcaccacccccgagaaatgggggcaaattctgtgaaggtctaagccaggaatctgaaaactgcacagatggtctttgcatcctaggcattgagaatgccagcgacattgctttgtactcgggcttgggtgctgccgtcgtggccgttgcagtcctggtcattggtgtcaccctttacagacggagccagagtgactatggcgtggacgtcattgactcttctgcattgacaggtggcttccagaccttcaacttcaaaacagtccgtcaaggtaactccctgctcctgaattctgccatgcagccagatctgacagtgagccggacatacagcggacccatctgtctgcaggaccctctggacaaggagctcatgacagagtcctcactctttaaccctttgtcggacatcaaagtgaaagtccagagctcgttcatggtttccctgggagtgtctgagagagctgagtaccacggcaagaatcattccaggacttttccccatggaaacaaccacagctttagtacaatgcatcccagaaataaaatgccctacatccaaaatctgtcatcactccccacaaggacagaactgaggacaactggtgtctttggccatttaggggggcgcttagtaatgccaaatacaggggtgagcttactcataccacacggtgccatcccagaggagaattcttgggagatttatatgtccatcaaccaaggtgaacccagtgaaaatccagcaaacaaaggatcaaatagcttgttgaagaacacatatgccattgggggaaaaataagcagacatctgggttcttctcgctga

SEQ ID NO: 148 - protein, 321 aa, Homo sapiens
MAANIVAKRRSLSATVVVYVDGSWEVWSEWSVCSPECEHLRIRECTAPPPRNGGKFCEGLSQESENCTDGLCILGIENASDIALYSGLGAAVVAVAVLVIGVTLYRRSQSDYGVDVIDSSALTGGFQTFNFKTVRQGNSLLLNSAMQPDLTVSRTYSGPICLQDPLDKELMTESSLFNPLSDIKVKVQSSFMVSLGVSERAEYHGKNHSRTFPHGNNHSFSTMHPRNKMPYIQNLSSLPTRTELRTTGVFGHLGGRLVMPNTGVSLLIPHGAIPEENSWEIYMSINQGEPSENPANKGSNSLLKNTYAIGGKISRHLGSSR

SEQ ID NO: 149 - DNA, 2043 bp, Homo sapiens
  CDS (1)...(2043)
atggcagccaacatcgtggctaagaggagaagcctgtcggccactgttgtggtctacgtggatgggagctgggaagtgtggagcgaatggtccgtctgcagtccagagtgtgaacatttgcggatccgggagtgcacagcaccacccccgagaaatgggggcaaattctgtgaaggtctaagccaggaatctgaaaactgcacagatggtctttgcatcctagataaaaaacctcttcatgaaataaaaccccaaagcattgagaatgccagcgacattgctttgtactcgggcttgggtgctgccgtcgtggccgttgcagtcctggtcattggtgtcaccctttacagacggagccagagtgactatggcgtggacgtcattgactcttctgcattgacaggtggcttccagaccttcaacttcaaaacagtccgtcaagccaagaatatcatggaactaatgatacaagaaaaatcctttggtaactccctgctcctgaattctgccatgcagccagatctgacagtgagccggacatacagcggacccatctgtctgcaggaccctctggacaaggagctcatgacagagtcctcactctttaaccctttgtcggacatcaaagtgaaagtccagagctcgttcatggtttccctgggagtgtctgagagagctgagtaccacggcaagaatcattccaggacttttccccatggaaacaaccacagctttagtacaatgcatcccagaaataaaatgccctacatccaaaatctgtcatcactccccacaaggacagaactgaggacaactggtgtctttggccatttaggggggcgcttagtaatgccaaatacaggggtgagcttactcataccacacggtgccatcccagaggagaattcttgggagatttatatgtccatcaaccaaggtgaacccagcctccagtcagatggctctgaggtgctcctgagtcctgaagtcacctgtggtcctccagacatgatcgtcaccactccctttgcattgaccatcccgcactgtgcagatgtcagttctgagcattggaatatccatttaaagaagaggacacagcagggcaaatgggaggaagtgatgtcagtggaagatgaatctacatcctgttactgccttttggacccctttgcgtgtcatgtgctcctggacagctttgggacctatgcgctcactggagagccaatcacagactgtgccgtgaagcaactgaaggtggcggtttttggctgcatgtcctgtaactccctggattacaacttgagagtttactgtgtggacaataccccttgtgcatttcaggaagtggtttcagatgaaaggcatcaaggtggacagctcctggaagaaccaaaattgctgcatttcaaagggaatacctttagtcttcagatttctgtccttgatattcccccattcctctggagaattaaaccattcactgcctgccaggaagtcccgttctcccgcgtgtggtgcagtaaccggcagcccctgcactgtgccttctccctggagcgttatacgcccactaccacccagctgtcctgcaaaatctgcattcggcagctcaaaggccatgaacagatcctccaagtgcagacatcaatcctagagagtgaacgagaaaccatcactttcttcgcacaagaggacagcactttccctgcacagactggccccaaagccttcaaaattccctactccatcagacagcggatttgtgctacatttgatacccccaatgccaaaggcaaggactggcagatgttagcacagaaaaacagcatcaacaggaatttatcttatttcgctacacaaagtagcccatctgctgtcattttgaacctgtgggaagctcgtcatcagcatgatggtgatcttgactccctggcctgtgcccttgaagagattgggaggacacacacgaaactctcaaacatttcagaatcccagcttgatgaagccgacttcaactacagcaggcaaaatggactctag

SEQ ID NO: 150 - protein, 680 aa, Homo sapiens
MAANIVAKRRSLSATVVVYVDGSWEVWSEWSVCSPECEHLRIRECTAPPPRNGGKFCEGLSQESENCTDGLCILDKKPLHEIKPQSIENASDIALYSGLGAAVVAVAVLVIGVTLYRRSQSDYGVDVIDSSALTGGFQTFNFKTVRQAKNIMELMIQEKSFGNSLLLNSAMQPDLTVSRTYSGPICLQDPLDKELMTESSLFNPLSDIKVKVQSSFMVSLGVSERAEYHGKNHSRTFPHGNNHSFSTMHPRNKMPYIQNLSSLPTRTELRTTGVFGHLGGRLVMPNTGVSLLIPHGAIPEENSWEIYMSINQGEPSLQSDGSEVLLSPEVTCGPPDMIVTTPFALTIPHCADVSSEHWNIHLKKRTQQGKWEEVMSVEDESTSCYCLLDPFACHVLLDSFGTYALTGEPITDCAVKQLKVAVFGCMSCNSLDYNLRVYCVDNTPCAFQEVVSDERHQGGQLLEEPKLLHFKGNTFSLQISVLDIPPFLWRIKPFTACQEVPFSRVWCSNRQPLHCAFSLERYTPTTTQLSCKICIRQLKGHEQILQVQTSILESERETITFFAQEDSTFPAQTGPKAFKIPYSIRQRICATFDTPNAKGKDWQMLAQKNSINRNLSYFATQSSPSAVILNLWEARHQHDGDLDSLACALEEIGRTHTKLSNISESQLDEADFNYSRQNGL

SEQ ID NO: 151 - DNA, 2010 bp, Homo sapiens
  CDS (1)...(2010)
atggcagccaacatcgtggctaagaggagaagcctgtcggccactgttgtggtctacgtggatgggagctgggaagtgtggagcgaatggtccgtctgcagtccagagtgtgaacatttgcggatccgggagtgcacagcaccacccccgagaaatgggggcaaattctgtgaaggtctaagccaggaatctgaaaactgcacagatggtctttgcatcctaggcattgagaatgccagcgacattgctttgtactcgggcttgggtgctgccgtcgtggccgttgcagtcctggtcattggtgtcaccctttacagacggagccagagtgactatggcgtggacgtcattgactcttctgcattgacaggtggcttccagaccttcaacttcaaaacagtccgtcaagccaagaatatcatggaactaatgatacaagaaaaatcctttggtaactccctgctcctgaattctgccatgcagccagatctgacagtgagccggacatacagcggacccatctgtctgcaggaccctctggacaaggagctcatgacagagtcctcactctttaaccctttgtcggacatcaaagtgaaagtccagagctcgttcatggtttccctgggagtgtctgagagagctgagtaccacggcaagaatcattccaggacttttccccatggaaacaaccacagctttagtacaatgcatcccagaaataaaatgccctacatccaaaatctgtcatcactccccacaaggacagaactgaggacaactggtgtctttggccatttaggggggcgcttagtaatgccaaatacaggggtgagcttactcataccacacggtgccatcccagaggagaattcttgggagatttatatgtccatcaaccaaggtgaacccagcctccagtcagatggctctgaggtgctcctgagtcctgaagtcacctgtggtcctccagacatgatcgtcaccactccctttgcattgaccatcccgcactgtgcagatgtcagttctgagcattggaatatccatttaaagaagaggacacagcagggcaaatgggaggaagtgatgtcagtggaagatgaatctacatcctgttactgccttttggacccctttgcgtgtcatgtgctcctggacagctttgggacctatgcgctcactggagagccaatcacagactgtgccgtgaagcaactgaaggtggcggtttttggctgcatgtcctgtaactccctggattacaacttgagagtttactgtgtggacaataccccttgtgcatttcaggaagtggtttcagatgaaaggcatcaaggtggacagctcctggaagaaccaaaattgctgcatttcaaagggaatacctttagtcttcagatttctgtccttgatattcccccattcctctggagaattaaaccattcactgcctgccaggaagtcccgttctcccgcgtgtggtgcagtaaccggcagcccctgcactgtgccttctccctggagcgttatacgcccactaccacccagctgtcctgcaaaatctgcattcggcagctcaaaggccatgaacagatcctccaagtgcagacatcaatcctagagagtgaacgagaaaccatcactttcttcgcacaagaggacagcactttccctgcacagactggccccaaagccttcaaaattccctactccatcagacagcggatttgtgctacatttgatacccccaatgccaaaggcaaggactggcagatgttagcacagaaaaacagcatcaacaggaatttatcttatttcgctacacaaagtagcccatctgctgtcattttgaacctgtgggaagctcgtcatcagcatgatggtgatcttgactccctggcctgtgcccttgaagagattgggaggacacacacgaaactctcaaacatttcagaatcccagcttgatgaagccgacttcaactacagcaggcaaaatggactctag

SEQ ID NO: 152 - protein, 669 aa, Homo sapiens
MAANIVAKRRSLSATVVVYVDGSWEVWSEWSVCSPECEHLRIRECTAPPPRNGGKFCEGLSQESENCTDGLCILGIENASDIALYSGLGAAVVAVAVLVIGVTLYRRSQSDYGVDVIDSSALTGGFQTFNFKTVRQAKNIMELMIQEKSFGNSLLLNSAMQPDLTVSRTYSGPICLQDPLDKELMTESSLFNPLSDIKVKVQSSFMVSLGVSERAEYHGKNHSRTFPHGNNHSFSTMHPRNKMPYIQNLSSLPTRTELRTTGVFGHLGGRLVMPNTGVSLLIPHGAIPEENSWEIYMSINQGEPSLQSDGSEVLLSPEVTCGPPDMIVTTPFALTIPHCADVSSEHWNIHLKKRTQQGKWEEVMSVEDESTSCYCLLDPFACHVLLDSFGTYALTGEPITDCAVKQLKVAVFGCMSCNSLDYNLRVYCVDNTPCAFQEVVSDERHQGGQLLEEPKLLHFKGNTFSLQISVLDIPPFLWRIKPFTACQEVPFSRVWCSNRQPLHCAFSLERYTPTTTQLSCKICIRQLKGHEQILQVQTSILESERETITFFAQEDSTFPAQTGPKAFKIPYSIRQRICATFDTPNAKGKDWQMLAQKNSINRNLSYFATQSSPSAVILNLWEARHQHDGDLDSLACALEEIGRTHTKLSNISESQLDEADFNYSRQNGL

SEQ ID NO: 153 - DNA, 2001 bp, Homo sapiens
  CDS (1)...(2001)
atggcagccaacatcgtggctaagaggagaagcctgtcggccactgttgtggtctacgtggatgggagctgggaagtgtggagcgaatggtccgtctgcagtccagagtgtgaacatttgcggatccgggagtgcacagcaccacccccgagaaatgggggcaaattctgtgaaggtctaagccaggaatctgaaaactgcacagatggtctttgcatcctagataaaaaacctcttcatgaaataaaaccccaaagcattgagaatgccagcgacattgctttgtactcgggcttgggtgctgccgtcgtggccgttgcagtcctggtcattggtgtcaccctttacagacggagccagagtgactatggcgtggacgtcattgactcttctgcattgacaggtggcttccagaccttcaacttcaaaacagtccgtcaaggtaactccctgctcctgaattctgccatgcagccagatctgacagtgagccggacatacagcggacccatctgtctgcaggaccctctggacaaggagctcatgacagagtcctcactctttaaccctttgtcggacatcaaagtgaaagtccagagctcgttcatggtttccctgggagtgtctgagagagctgagtaccacggcaagaatcattccaggacttttccccatggaaacaaccacagctttagtacaatgcatcccagaaataaaatgccctacatccaaaatctgtcatcactccccacaaggacagaactgaggacaactggtgtctttggccatttaggggggcgcttagtaatgccaaatacaggggtgagcttactcataccacacggtgccatcccagaggagaattcttgggagatttatatgtccatcaaccaaggtgaacccagcctccagtcagatggctctgaggtgctcctgagtcctgaagtcacctgtggtcctccagacatgatcgtcaccactccctttgcattgaccatcccgcactgtgcagatgtcagttctgagcattggaatatccatttaaagaagaggacacagcagggcaaatgggaggaagtgatgtcagtggaagatgaatctacatcctgttactgccttttggacccctttgcgtgtcatgtgctcctggacagctttgggacctatgcgctcactggagagccaatcacagactgtgccgtgaagcaactgaaggtggcggtttttggctgcatgtcctgtaactccctggattacaacttgagagtttactgtgtggacaataccccttgtgcatttcaggaagtggtttcagatgaaaggcatcaaggtggacagctcctggaagaaccaaaattgctgcatttcaaagggaatacctttagtcttcagatttctgtccttgatattcccccattcctctggagaattaaaccattcactgcctgccaggaagtcccgttctcccgcgtgtggtgcagtaaccggcagcccctgcactgtgccttctccctggagcgttatacgcccactaccacccagctgtcctgcaaaatctgcattcggcagctcaaaggccatgaacagatcctccaagtgcagacatcaatcctagagagtgaacgagaaaccatcactttcttcgcacaagaggacagcactttccctgcacagactggccccaaagccttcaaaattccctactccatcagacagcggatttgtgctacatttgatacccccaatgccaaaggcaaggactggcagatgttagcacagaaaaacagcatcaacaggaatttatcttatttcgctacacaaagtagcccatctgctgtcattttgaacctgtgggaagctcgtcatcagcatgatggtgatcttgactccctggcctgtgcccttgaagagattgggaggacacacacgaaactctcaaacatttcagaatcccagcttgatgaagccgacttcaactacagcaggcaaaatggactctag

SEQ ID NO: 154 - protein, 666 aa, Homo sapiens
MAANIVAKRRSLSATVVVYVDGSWEVWSEWSVCSPECEHLRIRECTAPPPRNGGKFCEGLSQESENCTDGLCILDKKPLHEIKPQSIENASDIALYSGLGAAVVAVAVLVIGVTLYRRSQSDYGVDVIDSSALTGGFQTFNFKTVRQGNSLLLNSAMQPDLTVSRTYSGPICLQDPLDKELMTESSLFNPLSDIKVKVQSSFMVSLGVSERAEYHGKNHSRTFPHGNNHSFSTMHPRNKMPYIQNLSSLPTRTELRTTGVFGHLGGRLVMPNTGVSLLIPHGAIPEENSWEIYMSINQGEPSLQSDGSEVLLSPEVTCGPPDMIVTTPFALTIPHCADVSSEHWNIHLKKRTQQGKWEEVMSVEDESTSCYCLLDPFACHVLLDSFGTYALTGEPITDCAVKQLKVAVFGCMSCNSLDYNLRVYCVDNTPCAFQEVVSDERHQGGQLLEEPKLLHFKGNTFSLQISVLDIPPFLWRIKPFTACQEVPFSRVWCSNRQPLHCAFSLERYTPTTTQLSCKICIRQLKGHEQILQVQTSILESERETITFFAQEDSTFPAQTGPKAFKIPYSIRQRICATFDTPNAKGKDWQMLAQKNSINRNLSYFATQSSPSAVILNLWEARHQHDGDLDSLACALEEIGRTHTKLSNISESQLDEADFNYSRQNGL

SEQ ID NO: 155 - DNA, 1968 bp, Homo sapiens
  CDS (1)...(1968)
atggcagccaacatcgtggctaagaggagaagcctgtcggccactgttgtggtctacgtggatgggagctgggaagtgtggagcgaatggtccgtctgcagtccagagtgtgaacatttgcggatccgggagtgcacagcaccacccccgagaaatgggggcaaattctgtgaaggtctaagccaggaatctgaaaactgcacagatggtctttgcatcctaggcattgagaatgccagcgacattgctttgtactcgggcttgggtgctgccgtcgtggccgttgcagtcctggtcattggtgtcaccctttacagacggagccagagtgactatggcgtggacgtcattgactcttctgcattgacaggtggcttccagaccttcaacttcaaaacagtccgtcaaggtaactccctgctcctgaattctgccatgcagccagatctgacagtgagccggacatacagcggacccatctgtctgcaggaccctctggacaaggagctcatgacagagtcctcactctttaaccctttgtcggacatcaaagtgaaagtccagagctcgttcatggtttccctgggagtgtctgagagagctgagtaccacggcaagaatcattccaggacttttccccatggaaacaaccacagctttagtacaatgcatcccagaaataaaatgccctacatccaaaatctgtcatcactccccacaaggacagaactgaggacaactggtgtctttggccatttaggggggcgcttagtaatgccaaatacaggggtgagcttactcataccacacggtgccatcccagaggagaattcttgggagatttatatgtccatcaaccaaggtgaacccagcctccagtcagatggctctgaggtgctcctgagtcctgaagtcacctgtggtcctccagacatgatcgtcaccactccctttgcattgaccatcccgcactgtgcagatgtcagttctgagcattggaatatccatttaaagaagaggacacagcagggcaaatgggaggaagtgatgtcagtggaagatgaatctacatcctgttactgccttttggacccctttgcgtgtcatgtgctcctggacagctttgggacctatgcgctcactggagagccaatcacagactgtgccgtgaagcaactgaaggtggcggtttttggctgcatgtcctgtaactccctggattacaacttgagagtttactgtgtggacaataccccttgtgcatttcaggaagtggtttcagatgaaaggcatcaaggtggacagctcctggaagaaccaaaattgctgcatttcaaagggaatacctttagtcttcagatttctgtccttgatattcccccattcctctggagaattaaaccattcactgcctgccaggaagtcccgttctcccgcgtgtggtgcagtaaccggcagcccctgcactgtgccttctccctggagcgttatacgcccactaccacccagctgtcctgcaaaatctgcattcggcagctcaaaggccatgaacagatcctccaagtgcagacatcaatcctagagagtgaacgagaaaccatcactttcttcgcacaagaggacagcactttccctgcacagactggccccaaagccttcaaaattccctactccatcagacagcggatttgtgctacatttgatacccccaatgccaaaggcaaggactggcagatgttagcacagaaaaacagcatcaacaggaatttatcttatttcgctacacaaagtagcccatctgctgtcattttgaacctgtgggaagctcgtcatcagcatgatggtgatcttgactccctggcctgtgcccttgaagagattgggaggacacacacgaaactctcaaacatttcagaatcccagcttgatgaagccgacttcaactacagcaggcaaaatggactctag

SEQ ID NO: 156 - protein, 655 aa, Homo sapiens
MAANIVAKRRSLSATVVVYVDGSWEVWSEWSVCSPECEHLRIRECTAPPPRNGGKFCEGLSQESENCTDGLCILGIENASDIALYSGLGAAVVAVAVLVIGVTLYRRSQSDYGVDVIDSSALTGGFQTFNFKTVRQGNSLLLNSAMQPDLTVSRTYSGPICLQDPLDKELMTESSLFNPLSDIKVKVQSSFMVSLGVSERAEYHGKNHSRTFPHGNNHSFSTMHPRNKMPYIQNLSSLPTRTELRTTGVFGHLGGRLVMPNTGVSLLIPHGAIPEENSWEIYMSINQGEPSLQSDGSEVLLSPEVTCGPPDMIVTTPFALTIPHCADVSSEHWNIHLKKRTQQGKWEEVMSVEDESTSCYCLLDPFACHVLLDSFGTYALTGEPITDCAVKQLKVAVFGCMSCNSLDYNLRVYCVDNTPCAFQEVVSDERHQGGQLLEEPKLLHFKGNTFSLQISVLDIPPFLWRIKPFTACQEVPFSRVWCSNRQPLHCAFSLERYTPTTTQLSCKICIRQLKGHEQILQVQTSILESERETITFFAQEDSTFPAQTGPKAFKIPYSIRQRICATFDTPNAKGKDWQMLAQKNSINRNLSYFATQSSPSAVILNLWEARHQHDGDLDSLACALEEIGRTHTKLSNISESQLDEADFNYSRQNGL

SEQ ID NO: 157 - DNA, 3411 bp, Homo sapiens
agtcactctctgaagactccatgagacccattcgactcggggccctgatcaccgaccctttcccgggctcccggagcgtgaagaagagccgccctccggaacgcggcgaggagcatggggagagcggcggccaccgcaggcggcggcggaggggcgcgccgctggctcccgtggctggggctgtgcttctgggcggcagggaccgcggctgcccgaggaactgacaatggcgaagcccttcccgaatccatcccatcagctcctgggacactgcctcatttcatagaggagccagatgatgcttatattatcaagagcaaccctattgcactcaggtgcaaagcgaggccagccatgcagatattcttcaaatgcaacggcgagtgggtccatcagaacgagcacgtctctgaagagactctggacgagagctcaggtttgaaggtccgcgaagtgttcatcaatgttactaggcaacaggtggaggacttccatgggcccgaggactattggtgccagtgtgtggcgtggagccacctgggtacctccaagagcaggaaggcctctgtgcgcatagcctatttacggaaaaactttgaacaagacccacaaggaagggaagttcccattgaaggcatgattgtactgcactgccgcccaccagagggagtccctgctgccgaggtggaatggctgaaaaatgaagagcccattgactctgaacaagacgagaacattgacaccagggctgaccataacctgatcatcaggcaggcacggctctcggactcaggaaattacacctgcatggcagccaacatcgtggctaagaggagaagcctgtcggccactgttgtggtctacgtggatgggagctgggaagtgtggagcgaatggtccgtctgcagtccagagtgtgaacatttgcggatccgggagtgcacagcaccacccccgagaaatgggggcaaattctgtgaaggtctaagccaggaatctgaaaactgcacagatggtctttgcatcctagataaaaaacctcttcatgaaataaaaccccaaagcattgagaatgccagcgacattgctttgtactcgggcttgggtgctgccgtcgtggccgttgcagtcctggtcattggtgtcaccctttacagacggagccagagtgactatggcgtggacgtcattgactcttctgcattgacaggtggcttccagaccttcaacttcaaaacagtccgtcaagccaagaatatcatggaactaatgatacaagaaaaatcctttggtaactccctgctcctgaattctgccatgcagccagatctgacagtgagccggacatacagcggacccatctgtctgcaggaccctctggacaaggagctcatgacagagtcctcactctttaaccctttgtcggacatcaaagtgaaagtccagagctcgttcatggtttccctgggagtgtctgagagagctgagtaccacggcaagaatcattccaggacttttccccatggaaacaaccacagctttagtacaatgcatcccagaaataaaatgccctacatccaaaatctgtcatcactccccacaaggacagaactgaggacaactggtgtctttggccatttaggggggcgcttagtaatgccaaatacaggggtgagcttactcataccacacggtgccatcccagaggagaattcttgggagatttatatgtccatcaaccaaggtgaacccagcctccagtcagatggctctgaggtgctcctgagtcctgaagtcacctgtggtcctccagacatgatcgtcaccactccctttgcattgaccatcccgcactgtgcagatgtcagttctgagcattggaatatccatttaaagaagaggacacagcagggcaaatgggaggaagtgatgtcagtggaagatgaatctacatcctgttactgccttttggacccctttgcgtgtcatgtgctcctggacagctttgggacctatgcgctcactggagagccaatcacagactgtgccgtgaagcaactgaaggtggcggtttttggctgcatgtcctgtaactccctggattacaacttgagagtttactgtgtggacaataccccttgtgcatttcaggaagtggtttcagatgaaaggcatcaaggtggacagctcctggaagaaccaaaattgctgcatttcaaagggaatacctttagtcttcagatttctgtccttgatattcccccattcctctggagaattaaaccattcactgcctgccaggaagtcccgttctcccgcgtgtggtgcagtaaccggcagcccctgcactgtgccttctccctggagcgttatacgcccactaccacccagctgtcctgcaaaatctgcattcggcagctcaaaggccatgaacagatcctccaagtgcagacatcaatcctagagagtgaacgagaaaccatcactttcttcgcacaagaggacagcactttccctgcacagactggccccaaagccttcaaaattccctactccatcagacagcggatttgtgctacatttgatacccccaatgccaaaggcaaggactggcagatgttagcacagaaaaacagcatcaacaggaatttatcttatttcgctacacaaagtagcccatctgctgtcattttgaacctgtgggaagctcgtcatcagcatgatggtgatcttgactccctggcctgtgcccttgaagagattgggaggacacacacgaaactctcaaacatttcagaatcccagcttgatgaagccgacttcaactacagcaggcaaaatggactctagtccacttcctcccatgagacagagtgatggccagcttggggacatttgctttaaatgggaaagaggccgctttctgcccagtggcgttgggggaattcagccttcatttataatcagtgagattcccctgttgaagaaactaaattttatataggtaaaacatgttaatagggaagagtacaagctctcttacatataagagggctctactatctccttggaatccacatttgggttaactcctcagatttggagtggcaaggataaaagtgagggcagaagtagctgtgggaaaagatgagctatgataatgctgggaaggcagagattgattaagtgcatgctttgaaataggtttttaatgatgtgccccaaagggccagctgattctggtactagattgtcagagttttctaccaactggcatctgtgatgtcagagatcattgtaaaaatggcttttagacgtgaaacaaggttgccaacccatttgtatgacttcaacaacgtcaaggagggcatttagaatttagaatctgagcacatcacaccagcaccagct

SEQ ID NO: 158 - DNA, 2304 bp, Homo sapiens
  CDS (1)...(2304)
atgcccagccagggcagggtggagagctgcagctgcaggtccggaggcgggggcccccggggcgactcgggggcggaccgcggggcggagctgccgcccgtgagtccggccgagccacctgagcccgagccgcgggacaccgtcgctcctgctctccgaatgctgcgcaccgcgatgggcctgaggagctggctcgccgccccatggggcgcgctgccgcctcggccaccgctgctgctgctcctgctgctgctgctcctgctgcagccgccgcctccgacctgggcgctcagcccccggatcagcctgcctctgggctctgaagagcggccattcctcagattcgaagctgaacacatctccaactacacagcccttctgctgagcagggatggcaggaccctgtacgtgggtgctcgagaggccctctttgcactcagtagcaacctcagcttcctgccaggcggggagtaccaggagctgctttggggtgcagacgcagagaagaaacagcagtgcagcttcaagggcaaggacccacagcgcgactgtcaaaactacatcaagatcctcctgccgctcagcggcagtcacctgttcacctgtggcacagcagccttcagccccatgtgtacctacatcaacatggagaacttcaccctggcaagggacgagaaggggaatgtcctcctggaagatggcaagggccgttgtcccttcgacccgaatttcaagtccactgccctggtggttgatggcgagctctacactggaacagtcagcagcttccaagggaatgacccggccatctcgcggagccaaagccttcgccccaccaagaccgagagctccctcaactggctgcaagacccagcttttgtggcctcagcctacattcctgagagcctgggcagcttgcaaggcgatgatgacaagatctactttttcttcagcgagactggccaggaatttgagttctttgagaacaccattgtgtcccgcattgcccgcatctgcaagggcgatgagggtggagagcgggtgctacagcagcgctggacctccttcctcaaggcccagctgctgtgctcacggcccgacgatggcttccccttcaacgtgctgcaggatgtcttcacgctgagccccagcccccaggactggcgtgacacccttttctatggggtcttcacttcccagtggcacaggggaactacagaaggctctgccgtctgtgtcttcacaatgaaggatgtgcagagagtcttcagcggcctctacaaggaggtgaaccgtgagacacagcagtggtacaccgtgacccacccggtgcccacaccccggcctggagcgtgcatcaccaacagtgcccgggaaaggaagatcaactcatccctgcagctcccagaccgcgtgctgaacttcctcaaggaccacttcctgatggacgggcaggtccgaagccgcatgctgctgctgcagccccaggctcgctaccagcgcgtggctgtacaccgcgtccctggcctgcaccacacctacgatgtcctcttcctgggcactggtgacggccggctccacaaggcagtgagcgtgggcccccgggtgcacatcattgaggagctgcagatcttctcatcgggacagcccgtgcagaatctgctcctggacacccacagggggctgctgtatgcggcctcacactcgggcgtagtccaggtgcccatggccaactgcagcctgtacaggagctgtggggactgcctcctcgcccgggacccctactgtgcttggagcggctccagctgcaagcacgtcagcctctaccagcctcagctggccaccaggccgtggatccaggacatcgagggagccagcgccaaggacctttgcagcgcgtcttcggttgtgtccccgtcttttgtaccaacaggggagaagccatgtgagcaagtccagttccagcccaacacagtgaacactttggcctgcccgctcctctccaacctggcgacccgactctggctacgcaacggggcccccgtcaatgcctcggcctcctgccacgtgctacccactggggacctgctgctggtgggcacccaacagctgggggagttccagtgctggtcactagaggagggcttccagcagctggtagccagctactgcccagaggtggtggaggacggggtggcagaccaaacagatgagggtggcagtgtacccgtcattatcagcacatcgcgtgtgagtgcacccagcacccggctggggcctgtccctggatgcaggctactctag

SEQ ID NO: 159 - protein, 767 aa, Homo sapiens
MPSQGRVESCSCRSGGGGPRGDSGADRGAELPPVSPAEPPEPEPRDTVAPALRMLRTAMGLRSWLAAPWGALPPRPPLLLLLLLLLLLQPPPPTWALSPRISLPLGSEERPFLRFEAEHISNYTALLLSRDGRTLYVGAREALFALSSNLSFLPGGEYQELLWGADAEKKQQCSFKGKDPQRDCQNYIKILLPLSGSHLFTCGTAAFSPMCTYINMENFTLARDEKGNVLLEDGKGRCPFDPNFKSTALVVDGELYTGTVSSFQGNDPAISRSQSLRPTKTESSLNWLQDPAFVASAYIPESLGSLQGDDDKIYFFFSETGQEFEFFENTIVSRIARICKGDEGGERVLQQRWTSFLKAQLLCSRPDDGFPFNVLQDVFTLSPSPQDWRDTLFYGVFTSQWHRGTTEGSAVCVFTMKDVQRVFSGLYKEVNRETQQWYTVTHPVPTPRPGACITNSARERKINSSLQLPDRVLNFLKDHFLMDGQVRSRMLLLQPQARYQRVAVHRVPGLHHTYDVLFLGTGDGRLHKAVSVGPRVHIIEELQIFSSGQPVQNLLLDTHRGLLYAASHSGVVQVPMANCSLYRSCGDCLLARDPYCAWSGSSCKHVSLYQPQLATRPWIQDIEGASAKDLCSASSVVSPSFVPTGEKPCEQVQFQPNTVNTLACPLLSNLATRLWLRNGAPVNASASCHVLPTGDLLLVGTQQLGEFQCWSLEEGFQQLVASYCPEVVEDGVADQTDEGGSVPVIISTSRVSAPSTRLGPVPGCRLL

SEQ ID NO: 160 - DNA, 3144 bp, Homo sapiens
  CDS (1)...(3144)
atgcccagccagggcagggtggagagctgcagctgcaggtccggaggcgggggcccccggggcgactcgggggcggaccgcggggcggagctgccgcccgtgagtccggccgagccacctgagcccgagccgcgggacaccgtcgctcctgctctccgaatgctgcgcaccgcgatgggcctgaggagctggctcgccgccccatggggcgcgctgccgcctcggccaccgctgctgctgctcctgctgctgctgctcctgctgcagccgccgcctccgacctgggcgctcagcccccggatcagcctgcctctgggctctgaagagcggccattcctcagattcgaagctgaacacatctccaactacacagcccttctgctgagcagggatggcaggaccctgtacgtgggtgctcgagaggccctctttgcactcagtagcaacctcagcttcctgccaggcggggagtaccaggagctgctttggggtgcagacgcagagaagaaacagcagtgcagcttcaagggcaaggacccacagcgcgactgtcaaaactacatcaagatcctcctgccgctcagcggcagtcacctgttcacctgtggcacagcagccttcagccccatgtgtacctacatcaacatggagaacttcaccctggcaagggacgagaaggggaatgtcctcctggaagatggcaagggccgttgtcccttcgacccgaatttcaagtccactgccctggtggttgatggcgagctctacactggaacagtcagcagcttccaagggaatgacccggccatctcgcggagccaaagccttcgccccaccaagaccgagagctccctcaactggctgcaagacccagcttttgtggcctcagcctacattcctgagagcctgggcagcttgcaaggcgatgatgacaagatctactttttcttcagcgagactggccaggaatttgagttctttgagaacaccattgtgtcccgcattgcccgcatctgcaagggcgatgagggtggagagcgggtgctacagcagcgctggacctccttcctcaaggcccagctgctgtgctcacggcccgacgatggcttccccttcaacgtgctgcaggatgtcttcacgctgagccccagcccccaggactggcgtgacacccttttctatggggtcttcacttcccagtggcacaggggaactacagaaggctctgccgtctgtgtcttcacaatgaaggatgtgcagagagtcttcagcggcctctacaaggaggtgaaccgtgagacacagcagtggtacaccgtgacccacccggtgcccacaccccggcctggagcgtgcatcaccaacagtgcccgggaaaggaagatcaactcatccctgcagctcccagaccgcgtgctgaacttcctcaaggaccacttcctgatggacgggcaggtccgaagccgcatgctgctgctgcagccccaggctcgctaccagcgcgtggctgtacaccgcgtccctggcctgcaccacacctacgatgtcctcttcctgggcactggtgacggccggctccacaaggcagtgagcgtgggcccccgggtgcacatcattgaggagctgcagatcttctcatcgggacagcccgtgcagaatctgctcctggacacccacagggggctgctgtatgcggcctcacactcgggcgtagtccaggtgcccatggccaactgcagcctgtacaggagctgtggggactgcctcctcgcccgggacccctactgtgcttggagcggctccagctgcaagcacgtcagcctctaccagcctcagctggccaccaggccgtggatccaggacatcgagggagccagcgccaaggacctttgcagcgcgtcttcggttgtgtccccgtcttttgtaccaacaggggagaagccatgtgagcaagtccagttccagcccaacacagtgaacactttggcctgcccgctcctctccaacctggcgacccgactctggctacgcaacggggcccccgtcaatgcctcggcctcctgccacgtgctacccactggggacctgctgctggtgggcacccaacagctgggggagttccagtgctggtcactagaggagggcttccagcagctggtagccagctactgcccagaggtggtggaggacggggtggcagaccaaacagatacggtgcccacaccccggcctggagcgtgcatcaccaacagtgcccgggaaaggaagatcaactcatccctgcagctcccagaccgcgtgctgaacttcctcaaggaccacttcctgatggacgggcaggtccgaagccgcatgctgctgctgcagccccaggctcgctaccagcgcgtggctgtacaccgcgtccctggcctgcaccacacctacgatgtcctcttcctgggcactggtgacggccggctccacaaggcagtgagcgtgggcccccgggtgcacatcattgaggagctgcagatcttctcatcgggacagcccgtgcagaatctgctcctggacacccacagggggctgctgtatgcggcctcacactcgggcgtagtccaggtgcccatggccaactgcagcctgtacaggagctgtggggactgcctcctcgcccgggacccctactgtgcttggagcggctccagctgcaagcacgtcagcctctaccagcctcagctggccaccaggccgtggatccaggacatcgagggagccagcgccaaggacctttgcagcgcgtcttcggttgtgtccccgtcttttgtaccaacaggggagaagccatgtgagcaagtccagttccagcccaacacagtgaacactttggcctgcccgctcctctccaacctggcgacccgactctggctacgcaacggggcccccgtcaatgcctcggcctcctgccacgtgctacccactggggacctgctgctggtgggcactggagtagcaccttccacgaccaggagaggcactggggaggggtcacagggatgccacccgggcagacctgaggaagagatggaggtggacgtgtcagcacccggctggggcctgtccctggatgcaggctactctagggcacctgtcccgccttga

SEQ ID NO: 161 - protein, 1047 aa, Homo sapiens
MPSQGRVESCSCRSGGGGPRGDSGADRGAELPPVSPAEPPEPEPRDTVAPALRMLRTAMGLRSWLAAPWGALPPRPPLLLLLLLLLLLQPPPPTWALSPRISLPLGSEERPFLRFEAEHISNYTALLLSRDGRTLYVGAREALFALSSNLSFLPGGEYQELLWGADAEKKQQCSFKGKDPQRDCQNYIKILLPLSGSHLFTCGTAAFSPMCTYINMENFTLARDEKGNVLLEDGKGRCPFDPNFKSTALVVDGELYTGTVSSFQGNDPAISRSQSLRPTKTESSLNWLQDPAFVASAYIPESLGSLQGDDDKIYFFFSETGQEFEFFENTIVSRIARICKGDEGGERVLQQRWTSFLKAQLLCSRPDDGFPFNVLQDVFTLSPSPQDWRDTLFYGVFTSQWHRGTTEGSAVCVFTMKDVQRVFSGLYKEVNRETQQWYTVTHPVPTPRPGACITNSARERKINSSLQLPDRVLNFLKDHFLMDGQVRSRMLLLQPQARYQRVAVHRVPGLHHTYDVLFLGTGDGRLHKAVSVGPRVHIIEELQIFSSGQPVQNLLLDTHRGLLYAASHSGVVQVPMANCSLYRSCGDCLLARDPYCAWSGSSCKHVSLYQPQLATRPWIQDIEGASAKDLCSASSVVSPSFVPTGEKPCEQVQFQPNTVNTLACPLLSNLATRLWLRNGAPVNASASCHVLPTGDLLLVGTQQLGEFQCWSLEEGFQQLVASYCPEVVEDGVADQTDTVPTPRPGACITNSARERKINSSLQLPDRVLNFLKDHFLMDGQVRSRMLLLQPQARYQRVAVHRVPGLHHTYDVLFLGTGDGRLHKAVSVGPRVHIIEELQIFSSGQPVQNLLLDTHRGLLYAASHSGVVQVPMANCSLYRSCGDCLLARDPYCAWSGSSCKHVSLYQPQLATRPWIQDIEGASAKDLCSASSVVSPSFVPTGEKPCEQVQFQPNTVNTLACPLLSNLATRLWLRNGAPVNASASCHVLPTGDLLLVGTGVAPSTTRRGTGEGSQGCHPGRPEEEMEVDVSAPGWGLSLDAGYSRAPVPP

SEQ ID NO: 162 - DNA, 3189 bp, Homo sapiens
  CDS (1)...(3189)
atgcccagccagggcagggtggagagctgcagctgcaggtccggaggcgggggcccccggggcgactcgggggcggaccgcggggcggagctgccgcccgtgagtccggccgagccacctgagcccgagccgcgggacaccgtcgctcctgctctccgaatgctgcgcaccgcgatgggcctgaggagctggctcgccgccccatggggcgcgctgccgcctcggccaccgctgctgctgctcctgctgctgctgctcctgctgcagccgccgcctccgacctgggcgctcagcccccggatcagcctgcctctgggctctgaagagcggccattcctcagattcgaagctgaacacatctccaactacacagcccttctgctgagcagggatggcaggaccctgtacgtgggtgctcgagaggccctctttgcactcagtagcaacctcagcttcctgccaggcggggagtaccaggagctgctttggggtgcagacgcagagaagaaacagcagtgcagcttcaagggcaaggacccacagcgcgactgtcaaaactacatcaagatcctcctgccgctcagcggcagtcacctgttcacctgtggcacagcagccttcagccccatgtgtacctacatcaacatggagaacttcaccctggcaagggacgagaaggggaatgtcctcctggaagatggcaagggccgttgtcccttcgacccgaatttcaagtccactgccctggtggttgatggcgagctctacactggaacagtcagcagcttccaagggaatgacccggccatctcgcggagccaaagccttcgccccaccaagaccgagagctccctcaactggctgcaagacccagcttttgtggcctcagcctacattcctgagagcctgggcagcttgcaaggcgatgatgacaagatctactttttcttcagcgagactggccaggaatttgagttctttgagaacaccattgtgtcccgcattgcccgcatctgcaagggcgatgagggtggagagcgggtgctacagcagcgctggacctccttcctcaaggcccagctgctgtgctcacggcccgacgatggcttccccttcaacgtgctgcaggatgtcttcacgctgagccccagcccccaggactggcgtgacacccttttctatggggtcttcacttcccagtggcacaggggaactacagaaggctctgccgtctgtgtcttcacaatgaaggatgtgcagagagtcttcagcggcctctacaaggaggtgaaccgtgagacacagcagtggtacaccgtgacccacccggtgcccacaccccggcctggagcgtgcatcaccaacagtgcccgggaaaggaagatcaactcatccctgcagctcccagaccgcgtgctgaacttcctcaaggaccacttcctgatggacgggcaggtccgaagccgcatgctgctgctgcagccccaggctcgctaccagcgcgtggctgtacaccgcgtccctggcctgcaccacacctacgatgtcctcttcctgggcactggtgacggccggctccacaaggcagtgagcgtgggcccccgggtgcacatcattgaggagctgcagatcttctcatcgggacagcccgtgcagaatctgctcctggacacccacagggggctgctgtatgcggcctcacactcgggcgtagtccaggtgcccatggccaactgcagcctgtacaggagctgtggggactgcctcctcgcccgggacccctactgtgcttggagcggctccagctgcaagcacgtcagcctctaccagcctcagctggccaccaggccgtggatccaggacatcgagggagccagcgccaaggacctttgcagcgcgtcttcggttgtgtccccgtcttttgtaccaacaggggagaagccatgtgagcaagtccagttccagcccaacacagtgaacactttggcctgcccgctcctctccaacctggcgacccgactctggctacgcaacggggcccccgtcaatgcctcggcctcctgccacgtgctacccactggggacctgctgctggtgggcacccaacagctgggggagttccagtgctggtcactagaggagggcttccagcagctggtagccagctactgcccagaggtggtggaggacggggtggcagaccaaacagatacggtgcccacaccccggcctggagcgtgcatcaccaacagtgcccgggaaaggaagatcaactcatccctgcagctcccagaccgcgtgctgaacttcctcaaggaccacttcctgatggacgggcaggtccgaagccgcatgctgctgctgcagccccaggctcgctaccagcgcgtggctgtacaccgcgtccctggcctgcaccacacctacgatgtcctcttcctgggcactggtgacggccggctccacaaggcagtgagcgtgggcccccgggtgcacatcattgaggagctgcagatcttctcatcgggacagcccgtgcagaatctgctcctggacacccacagggggctgctgtatgcggcctcacactcgggcgtagtccaggtgcccatggccaactgcagcctgtacaggagctgtggggactgcctcctcgcccgggacccctactgtgcttggagcggctccagctgcaagcacgtcagcctctaccagcctcagctggccaccaggccgtggatccaggacatcgagggagccagcgccaaggacctttgcagcgcgtcttcggttgtgtccccgtcttttgtaccaacaggggagaagccatgtgagcaagtccagttccagcccaacacagtgaacactttggcctgcccgctcctctccaacctggcgacccgactctggctacgcaacggggcccccgtcaatgcctcggcctcctgccacgtgctacccactggggacctgctgctggtgggcacccaacagctgggggagttccagtgctggtcactagaggagggcttccagcagctggtagccagctactgcccagaggtggtggaggacggggtggcaaaccaaacagatgagggtggcagtgtacccgtcattatcagcacatcgcgtgtgagtgcacccagcacccggctggggcctgtccctggatgcaggctactctag

SEQ ID NO: 163 - protein, 1062 aa, Homo sapiens
MPSQGRVESCSCRSGGGGPRGDSGADRGAELPPVSPAEPPEPEPRDTVAPALRMLRTAMGLRSWLAAPWGALPPRPPLLLLLLLLLLLQPPPPTWALSPRISLPLGSEERPFLRFEAEHISNYTALLLSRDGRTLYVGAREALFALSSNLSFLPGGEYQELLWGADAEKKQQCSFKGKDPQRDCQNYIKILLPLSGSHLFTCGTAAFSPMCTYINMENFTLARDEKGNVLLEDGKGRCPFDPNFKSTALVVDGELYTGTVSSFQGNDPAISRSQSLRPTKTESSLNWLQDPAFVASAYIPESLGSLQGDDDKIYFFFSETGQEFEFFENTIVSRIARICKGDEGGERVLQQRWTSFLKAQLLCSRPDDGFPFNVLQDVFTLSPSPQDWRDTLFYGVFTSQWHRGTTEGSAVCVFTMKDVQRVFSGLYKEVNRETQQWYTVTHPVPTPRPGACITNSARERKINSSLQLPDRVLNFLKDHFLMDGQVRSRMLLLQPQARYQRVAVHRVPGLHHTYDVLFLGTGDGRLHKAVSVGPRVHIIEELQIFSSGQPVQNLLLDTHRGLLYAASHSGVVQVPMANCSLYRSCGDCLLARDPYCAWSGSSCKHVSLYQPQLATRPWIQDIEGASAKDLCSASSVVSPSFVPTGEKPCEQVQFQPNTVNTLACPLLSNLATRLWLRNGAPVNASASCHVLPTGDLLLVGTQQLGEFQCWSLEEGFQQLVASYCPEVVEDGVADQTDTVPTPRPGACITNSARERKINSSLQLPDRVLNFLKDHFLMDGQVRSRMLLLQPQARYQRVAVHRVPGLHHTYDVLFLGTGDGRLHKAVSVGPRVHIIEELQIFSSGQPVQNLLLDTHRGLLYAASHSGVVQVPMANCSLYRSCGDCLLARDPYCAWSGSSCKHVSLYQPQLATRPWIQDIEGASAKDLCSASSVVSPSFVPTGEKPCEQVQFQPNTVNTLACPLLSNLATRLWLRNGAPVNASASCHVLPTGDLLLVGTQQLGEFQCWSLEEGFQQLVASYCPEVVEDGVANQTDEGGSVPVIISTSRVSAPSTRLGPVPGCRLL

SEQ ID NO: 164 - DNA, 2517 bp, Homo sapiens
  CDS (1)...(2517)
atgcccagccagggcagggtggagagctgcagctgcaggtccggaggcgggggcccccggggcgactcgggggcggaccgcggggcggagctgccgcccgtgagtccggccgagccacctgagcccgagccgcgggacaccgtcgctcctgctctccgaatgctgcgcaccgcgatgggcctgaggagctggctcgccgccccatggggcgcgctgccgcctcggccaccgctgctgctgctcctgctgctgctgctcctgctgcagccgccgcctccgacctgggcgctcagcccccggatcagcctgcctctgggctctgaagagcggccattcctcagattcgaagctgaacacatctccaactacacagcccttctgctgagcagggatggcaggaccctgtacgtgggtgctcgagaggccctctttgcactcagtagcaacctcagcttcctgccaggcggggagtaccaggagctgctttggggtgcagacgcagagaagaaacagcagtgcagcttcaagggcaaggacccacagcgcgactgtcaaaactacatcaagatcctcctgccgctcagcggcagtcacctgttcacctgtggcacagcagccttcagccccatgtgtacctacatcaacatggagaacttcaccctggcaagggacgagaaggggaatgtcctcctggaagatggcaagggccgttgtcccttcgacccgaatttcaagtccactgccctggtggttgatggcgagctctacactggaacagtcagcagcttccaagggaatgacccggccatctcgcggagccaaagccttcgccccaccaagaccgagagctccctcaactggctgcaagacccagcttttgtggcctcagcctacattcctgagagcctgggcagcttgcaaggcgatgatgacaagatctactttttcttcagcgagactggccaggaatttgagttctttgagaacaccattgtgtcccgcattgcccgcatctgcaagggcgatgagggtggagagcgggtgctacagcagcgctggacctccttcctcaaggcccagctgctgtgctcacggcccgacgatggcttccccttcaacgtgctgcaggatgtcttcacgctgagccccagcccccaggactggcgtgacacccttttctatggggtcttcacttcccagtggcacaggggaactacagaaggctctgccgtctgtgtcttcacaatgaaggatgtgcagagagtcttcagcggcctctacaaggaggtgaaccgtgagacacagcagtggtacaccgtgacccacccggtgcccacaccccggcctggagcgtgcatcaccaacagtgcccgggaaaggaagatcaactcatccctgcagctcccagaccgcgtgctgaacttcctcaaggaccacttcctgatggacgggcaggtccgaagccgcatgctgctgctgcagccccaggctcgctaccagcgcgtggctgtacaccgcgtccctggcctgcaccacacctacgatgtcctcttcctgggcactggtgacggccggctccacaaggcagtgagcgtgggcccccgggtgcacatcattgaggagctgcagatcttctcatcgggacagcccgtgcagaatctgctcctggacacccacagggggctgctgtatgcggcctcacactcgggcgtagtccaggtgcccatggccaactgcagcctgtacaggagctgtggggactgcctcctcgcccgggacccctactgtgcttggagcggctccagctgcaagcacgtcagcctctaccagcctcagctggccaccaggccgtggatccaggacatcgagggagccagcgccaaggacctttgcagcgcgtcttcggttgtgtccccgtcttttgtaccaacaggggagaagccatgtgagcaagtccagttccagcccaacacagtgaacactttggcctgcccgctcctctccaacctggcgacccgactctggctacgcaacggggcccccgtcaatgcctcggcctcctgccacgtgctacccactggggacctgctgctggtgggcacccaacagctgggggagttccagtgctggtcactagaggagggcttccagcagctggtagccagctactgcccagaggtggtggaggacggggtggcagaccaaacagatgagggtggcagtgtacccgtcattatcagcacatcgcgtgtgagtgcaccagctggtggcaaggccagctggggtgcagacaggtcctactggaaggagttcctggtgatgtgcacgctctttgtgctggccgtgctgctcccagttttattcttgctctaccggcaccggaacagcatgaaagtcttcctgaagcagggggaatgtgccagcgtgcaccccaagacctgccctgtggtgctgccccctgagacccgccctcggtttcaccgtcaccgccgacgtcgaggtgactcaacggcctag

SEQ ID NO: 165 - protein, 838 aa, Homo sapiens
MPSQGRVESCSCRSGGGGPRGDSGADRGAELPPVSPAEPPEPEPRDTVAPALRMLRTAMGLRSWLAAPWGALPPRPPLLLLLLLLLLLQPPPPTWALSPRISLPLGSEERPFLRFEAEHISNYTALLLSRDGRTLYVGAREALFALSSNLSFLPGGEYQELLWGADAEKKQQCSFKGKDPQRDCQNYIKILLPLSGSHLFTCGTAAFSPMCTYINMENFTLARDEKGNVLLEDGKGRCPFDPNFKSTALVVDGELYTGTVSSFQGNDPAISRSQSLRPTKTESSLNWLQDPAFVASAYIPESLGSLQGDDDKIYFFFSETGQEFEFFENTIVSRIARICKGDEGGERVLQQRWTSFLKAQLLCSRPDDGFPFNVLQDVFTLSPSPQDWRDTLFYGVFTSQWHRGTTEGSAVCVFTMKDVQRVFSGLYKEVNRETQQWYTVTHPVPTPRPGACITNSARERKINSSLQLPDRVLNFLKDHFLMDGQVRSRMLLLQPQARYQRVAVHRVPGLHHTYDVLFLGTGDGRLHKAVSVGPRVHIIEELQIFSSGQPVQNLLLDTHRGLLYAASHSGVVQVPMANCSLYRSCGDCLLARDPYCAWSGSSCKHVSLYQPQLATRPWIQDIEGASAKDLCSASSVVSPSFVPTGEKPCEQVQFQPNTVNTLACPLLSNLATRLWLRNGAPVNASASCHVLPTGDLLLVGTQQLGEFQCWSLEEGFQQLVASYCPEVVEDGVADQTDEGGSVPVIISTSRVSAPAGGKASWGADRSYWKEFLVMCTLFVLAVLLPVLFLLYRHRNSMKVFLKQGECASVHPKTCPVVLPPETRPRFHRHRRRRGDSTA

SEQ ID NO: 166 - DNA, 3453 bp, Homo sapiens
  CDS (1)...(3453)
atgcccagccagggcagggtggagagctgcagctgcaggtccggaggcgggggcccccggggcgactcgggggcggaccgcggggcggagctgccgcccgtgagtccggccgagccacctgagcccgagccgcgggacaccgtcgctcctgctctccgaatgctgcgcaccgcgatgggcctgaggagctggctcgccgccccatggggcgcgctgccgcctcggccaccgctgctgctgctcctgctgctgctgctcctgctgcagccgccgcctccgacctgggcgctcagcccccggatcagcctgcctctgggctctgaagagcggccattcctcagattcgaagctgaacacatctccaactacacagcccttctgctgagcagggatggcaggaccctgtacgtgggtgctcgagaggccctctttgcactcagtagcaacctcagcttcctgccaggcggggagtaccaggagctgctttggggtgcagacgcagagaagaaacagcagtgcagcttcaagggcaaggacccacagcgcgactgtcaaaactacatcaagatcctcctgccgctcagcggcagtcacctgttcacctgtggcacagcagccttcagccccatgtgtacctacatcaacatggagaacttcaccctggcaagggacgagaaggggaatgtcctcctggaagatggcaagggccgttgtcccttcgacccgaatttcaagtccactgccctggtggttgatggcgagctctacactggaacagtcagcagcttccaagggaatgacccggccatctcgcggagccaaagccttcgccccaccaagaccgagagctccctcaactggctgcaagacccagcttttgtggcctcagcctacattcctgagagcctgggcagcttgcaaggcgatgatgacaagatctactttttcttcagcgagactggccaggaatttgagttctttgagaacaccattgtgtcccgcattgcccgcatctgcaagggcgatgagggtggagagcgggtgctacagcagcgctggacctccttcctcaaggcccagctgctgtgctcacggcccgacgatggcttccccttcaacgtgctgcaggatgtcttcacgctgagccccagcccccaggactggcgtgacacccttttctatggggtcttcacttcccagtggcacaggggaactacagaaggctctgccgtctgtgtcttcacaatgaaggatgtgcagagagtcttcagcggcctctacaaggaggtgaaccgtgagacacagcagtggtacaccgtgacccacccggtgcccacaccccggcctggagcgtgcatcaccaacagtgcccgggaaaggaagatcaactcatccctgcagctcccagaccgcgtgctgaacttcctcaaggaccacttcctgatggacgggcaggtccgaagccgcatgctgctgctgcagccccaggctcgctaccagcgcgtggctgtacaccgcgtccctggcctgcaccacacctacgatgtcctcttcctgggcactggtgacggccggctccacaaggcagtgagcgtgggcccccgggtgcacatcattgaggagctgcagatcttctcatcgggacagcccgtgcagaatctgctcctggacacccacagggggctgctgtatgcggcctcacactcgggcgtagtccaggtgcccatggccaactgcagcctgtacaggagctgtggggactgcctcctcgcccgggacccctactgtgcttggagcggctccagctgcaagcacgtcagcctctaccagcctcagctggccaccaggccgtggatccaggacatcgagggagccagcgccaaggacctttgcagcgcgtcttcggttgtgtccccgtcttttgtaccaacaggggagaagccatgtgagcaagtccagttccagcccaacacagtgaacactttggcctgcccgctcctctccaacctggcgacccgactctggctacgcaacggggcccccgtcaatgcctcggcctcctgccacgtgctacccactggggacctgctgctggtgggcacccaacagctgggggagttccagtgctggtcactagaggagggcttccagcagctggtagccagctactgcccagaggtggtggaggacggggtggcagaccaaacagatacggtgcccacaccccggcctggagcgtgcatcaccaacagtgcccgggaaaggaagatcaactcatccctgcagctcccagaccgcgtgctgaacttcctcaaggaccacttcctgatggacgggcaggtccgaagccgcatgctgctgctgcagccccaggctcgctaccagcgcgtggctgtacaccgcgtccctggcctgcaccacacctacgatgtcctcttcctgggcactggtgacggccggctccacaaggcagtgagcgtgggcccccgggtgcacatcattgaggagctgcagatcttctcatcgggacagcccgtgcagaatctgctcctggacacccacagggggctgctgtatgcggcctcacactcgggcgtagtccaggtgcccatggccaactgcagcctgtacaggagctgtggggactgcctcctcgcccgggacccctactgtgcttggagcggctccagctgcaagcacgtcagcctctaccagcctcagctggccaccaggccgtggatccaggacatcgagggagccagcgccaaggacctttgcagcgcgtcttcggttgtgtccccgtcttttgtaccaacaggggagaagccatgtgagcaagtccagttccagcccaacacagtgaacactttggcctgcccgctcctctccaacctggcgacccgactctggctacgcaacggggcccccgtcaatgcctcggcctcctgccacgtgctacccactggggacctgctgctggtgggcacccaacagctgggggagttccagtgctggtcactagaggagggcttccagcagctggtagccagctactgcccagaggtggtggaggacggggtggcaaaccaaacagatgagggtggcagtgtacccgtcattatcagcacatcgcgtgtgagtgcaccagctggtggcaaggccagctggggtgcagacaggtcctactggaaggagttcctggtgatgtgcacgctctttgtgctggccgtgctgctcccagttttattcttgctctaccggcaccggaacagcatgaaagtcttcctgaagcagggggaatgtgccagcgtgcaccccaagacctgccctgtggtgctgccccctgagacccgccctcggtttcaccgtcaccgccgacgtcgaggtgcccgaaggaccgcgcacctggtgcatgacccgcaagcccggtgcctgaagcggatccagacatga

SEQ ID NO: 167 - protein, 1150 aa, Homo sapiens
MPSQGRVESCSCRSGGGGPRGDSGADRGAELPPVSPAEPPEPEPRDTVAPALRMLRTAMGLRSWLAAPWGALPPRPPLLLLLLLLLLLQPPPPTWALSPRISLPLGSEERPFLRFEAEHISNYTALLLSRDGRTLYVGAREALFALSSNLSFLPGGEYQELLWGADAEKKQQCSFKGKDPQRDCQNYIKILLPLSGSHLFTCGTAAFSPMCTYINMENFTLARDEKGNVLLEDGKGRCPFDPNFKSTALVVDGELYTGTVSSFQGNDPAISRSQSLRPTKTESSLNWLQDPAFVASAYIPESLGSLQGDDDKIYFFFSETGQEFEFFENTIVSRIARICKGDEGGERVLQQRWTSFLKAQLLCSRPDDGFPFNVLQDVFTLSPSPQDWRDTLFYGVFTSQWHRGTTEGSAVCVFTMKDVQRVFSGLYKEVNRETQQWYTVTHPVPTPRPGACITNSARERKINSSLQLPDRVLNFLKDHFLMDGQVRSRMLLLQPQARYQRVAVHRVPGLHHTYDVLFLGTGDGRLHKAVSVGPRVHIIEELQIFSSGQPVQNLLLDTHRGLLYAASHSGVVQVPMANCSLYRSCGDCLLARDPYCAWSGSSCKHVSLYQPQLATRPWIQDIEGASAKDLCSASSVVSPSFVPTGEKPCEQVQFQPNTVNTLACPLLSNLATRLWLRNGAPVNASASCHVLPTGDLLLVGTQQLGEFQCWSLEEGFQQLVASYCPEVVEDGVADQTDTVPTPRPGACITNSARERKINSSLQLPDRVLNFLKDHFLMDGQVRSRMLLLQPQARYQRVAVHRVPGLHHTYDVLFLGTGDGRLHKAVSVGPRVHIIEELQIFSSGQPVQNLLLDTHRGLLYAASHSGVVQVPMANCSLYRSCGDCLLARDPYCAWSGSSCKHVSLYQPQLATRPWIQDIEGASAKDLCSASSVVSPSFVPTGEKPCEQVQFQPNTVNTLACPLLSNLATRLWLRNGAPVNASASCHVLPTGDLLLVGTQQLGEFQCWSLEEGFQQLVASYCPEVVEDGVANQTDEGGSVPVIISTSRVSAPAGGKASWGADRSYWKEFLVMCTLFVLAVLLPVLFLLYRHRNSMKVFLKQGECASVHPKTCPVVLPPETRPRFHRHRRRRGARRTAHLVHDPQARCLKRIQT

SEQ ID NO: 168 - DNA, 2592 bp, Homo sapiens
  CDS (1)...(2592)
atgcccagccagggcagggtggagagctgcagctgcaggtccggaggcgggggcccccggggcgactcgggggcggaccgcggggcggagctgccgcccgtgagtccggccgagccacctgagcccgagccgcgggacaccgtcgctcctgctctccgaatgctgcgcaccgcgatgggcctgaggagctggctcgccgccccatggggcgcgctgccgcctcggccaccgctgctgctgctcctgctgctgctgctcctgctgcagccgccgcctccgacctgggcgctcagcccccggatcagcctgcctctgggctctgaagagcggccattcctcagattcgaagctgaacacatctccaactacacagcccttctgctgagcagggatggcaggaccctgtacgtgggtgctcgagaggccctctttgcactcagtagcaacctcagcttcctgccaggcggggagtaccaggagctgctttggggtgcagacgcagagaagaaacagcagtgcagcttcaagggcaaggacccacagcgcgactgtcaaaactacatcaagatcctcctgccgctcagcggcagtcacctgttcacctgtggcacagcagccttcagccccatgtgtacctacatcaacatggagaacttcaccctggcaagggacgagaaggggaatgtcctcctggaagatggcaagggccgttgtcccttcgacccgaatttcaagtccactgccctggtggttgatggcgagctctacactggaacagtcagcagcttccaagggaatgacccggccatctcgcggagccaaagccttcgccccaccaagaccgagagctccctcaactggctgcaagacccagcttttgtggcctcagcctacattcctgagagcctgggcagcttgcaaggcgatgatgacaagatctactttttcttcagcgagactggccaggaatttgagttctttgagaacaccattgtgtcccgcattgcccgcatctgcaagggcgatgagggtggagagcgggtgctacagcagcgctggacctccttcctcaaggcccagctgctgtgctcacggcccgacgatggcttccccttcaacgtgctgcaggatgtcttcacgctgagccccagcccccaggactggcgtgacacccttttctatggggtcttcacttcccagtggcacaggggaactacagaaggctctgccgtctgtgtcttcacaatgaaggatgtgcagagagtcttcagcggcctctacaaggaggtgaaccgtgagacacagcagtggtacaccgtgacccacccggtgcccacaccccggcctggagcgtgcatcaccaacagtgcccgggaaaggaagatcaactcatccctgcagctcccagaccgcgtgctgaacttcctcaaggaccacttcctgatggacgggcaggtccgaagccgcatgctgctgctgcagccccaggctcgctaccagcgcgtggctgtacaccgcgtccctggcctgcaccacacctacgatgtcctcttcctgggcactggtgacggccggctccacaaggcagtgagcgtgggcccccgggtgcacatcattgaggagctgcagatcttctcatcgggacagcccgtgcagaatctgctcctggacacccacagggggctgctgtatgcggcctcacactcgggcgtagtccaggtgcccatggccaactgcagcctgtacaggagctgtggggactgcctcctcgcccgggacccctactgtgcttggagcggctccagctgcaagcacgtcagcctctaccagcctcagctggccaccaggccgtggatccaggacatcgagggagccagcgccaaggacctttgcagcgcgtcttcggttgtgtccccgtcttttgtaccaacaggggagaagccatgtgagcaagtccagttccagcccaacacagtgaacactttggcctgcccgctcctctccaacctggcgacccgactctggctacgcaacggggcccccgtcaatgcctcggcctcctgccacgtgctacccactggggacctgctgctggtgggcacccaacagctgggggagttccagtgctggtcactagaggagggcttccagcagctggtagccagctactgcccagaggtggtggaggacggggtggcagaccaaacagatgagggtggcagtgtacccgtcattatcagcacatcgcgtgtgagtgcaccagctggtggcaaggccagctggggtgcagacaggtcctactggaaggagttcctggtgatgtgcacgctctttgtgctggccgtgctgctcccagttttattcttgctctaccggcaccggaacagcatgaaagtcttcctgaagcagggggaatgtgccagcgtgcaccccaagacctgccctgtggtgctgccccctgagacccgcccactcaacggcctagggccccctagcaccccgctcgatcaccgagggtaccagtccccccgaaggaccgcgcacctggtgcatgacccgcaagcccggtgcctgaagcggatccagacatga

SEQ ID NO: 169 - protein, 863 aa, Homo sapiens
MPSQGRVESCSCRSGGGGPRGDSGADRGAELPPVSPAEPPEPEPRDTVAPALRMLRTAMGLRSWLAAPWGALPPRPPLLLLLLLLLLLQPPPPTWALSPRISLPLGSEERPFLRFEAEHISNYTALLLSRDGRTLYVGAREALFALSSNLSFLPGGEYQELLWGADAEKKQQCSFKGKDPQRDCQNYIKILLPLSGSHLFTCGTAAFSPMCTYINMENFTLARDEKGNVLLEDGKGRCPFDPNFKSTALVVDGELYTGTVSSFQGNDPAISRSQSLRPTKTESSLNWLQDPAFVASAYIPESLGSLQGDDDKIYFFFSETGQEFEFFENTIVSRIARICKGDEGGERVLQQRWTSFLKAQLLCSRPDDGFPFNVLQDVFTLSPSPQDWRDTLFYGVFTSQWHRGTTEGSAVCVFTMKDVQRVFSGLYKEVNRETQQWYTVTHPVPTPRPGACITNSARERKINSSLQLPDRVLNFLKDHFLMDGQVRSRMLLLQPQARYQRVAVHRVPGLHHTYDVLFLGTGDGRLHKAVSVGPRVHIIEELQIFSSGQPVQNLLLDTHRGLLYAASHSGVVQVPMANCSLYRSCGDCLLARDPYCAWSGSSCKHVSLYQPQLATRPWIQDIEGASAKDLCSASSVVSPSFVPTGEKPCEQVQFQPNTVNTLACPLLSNLATRLWLRNGAPVNASASCHVLPTGDLLLVGTQQLGEFQCWSLEEGFQQLVASYCPEVVEDGVADQTDEGGSVPVIISTSRVSAPAGGKASWGADRSYWKEFLVMCTLFVLAVLLPVLFLLYRHRNSMKVFLKQGECASVHPKTCPVVLPPETRPLNGLGPPSTPLDHRGYQSPRRTAHLVHDPQARCLKRIQT

SEQ ID NO: 170 - DNA, 3477 bp, Homo sapiens
  CDS (1)...(3477)
atgcccagccagggcagggtggagagctgcagctgcaggtccggaggcgggggcccccggggcgactcgggggcggaccgcggggcggagctgccgcccgtgagtccggccgagccacctgagcccgagccgcgggacaccgtcgctcctgctctccgaatgctgcgcaccgcgatgggcctgaggagctggctcgccgccccatggggcgcgctgccgcctcggccaccgctgctgctgctcctgctgctgctgctcctgctgcagccgccgcctccgacctgggcgctcagcccccggatcagcctgcctctgggctctgaagagcggccattcctcagattcgaagctgaacacatctccaactacacagcccttctgctgagcagggatggcaggaccctgtacgtgggtgctcgagaggccctctttgcactcagtagcaacctcagcttcctgccaggcggggagtaccaggagctgctttggggtgcagacgcagagaagaaacagcagtgcagcttcaagggcaaggacccacagcgcgactgtcaaaactacatcaagatcctcctgccgctcagcggcagtcacctgttcacctgtggcacagcagccttcagccccatgtgtacctacatcaacatggagaacttcaccctggcaagggacgagaaggggaatgtcctcctggaagatggcaagggccgttgtcccttcgacccgaatttcaagtccactgccctggtggttgatggcgagctctacactggaacagtcagcagcttccaagggaatgacccggccatctcgcggagccaaagccttcgccccaccaagaccgagagctccctcaactggctgcaagacccagcttttgtggcctcagcctacattcctgagagcctgggcagcttgcaaggcgatgatgacaagatctactttttcttcagcgagactggccaggaatttgagttctttgagaacaccattgtgtcccgcattgcccgcatctgcaagggcgatgagggtggagagcgggtgctacagcagcgctggacctccttcctcaaggcccagctgctgtgctcacggcccgacgatggcttccccttcaacgtgctgcaggatgtcttcacgctgagccccagcccccaggactggcgtgacacccttttctatggggtcttcacttcccagtggcacaggggaactacagaaggctctgccgtctgtgtcttcacaatgaaggatgtgcagagagtcttcagcggcctctacaaggaggtgaaccgtgagacacagcagtggtacaccgtgacccacccggtgcccacaccccggcctggagcgtgcatcaccaacagtgcccgggaaaggaagatcaactcatccctgcagctcccagaccgcgtgctgaacttcctcaaggaccacttcctgatggacgggcaggtccgaagccgcatgctgctgctgcagccccaggctcgctaccagcgcgtggctgtacaccgcgtccctggcctgcaccacacctacgatgtcctcttcctgggcactggtgacggccggctccacaaggcagtgagcgtgggcccccgggtgcacatcattgaggagctgcagatcttctcatcgggacagcccgtgcagaatctgctcctggacacccacagggggctgctgtatgcggcctcacactcgggcgtagtccaggtgcccatggccaactgcagcctgtacaggagctgtggggactgcctcctcgcccgggacccctactgtgcttggagcggctccagctgcaagcacgtcagcctctaccagcctcagctggccaccaggccgtggatccaggacatcgagggagccagcgccaaggacctttgcagcgcgtcttcggttgtgtccccgtcttttgtaccaacaggggagaagccatgtgagcaagtccagttccagcccaacacagtgaacactttggcctgcccgctcctctccaacctggcgacccgactctggctacgcaacggggcccccgtcaatgcctcggcctcctgccacgtgctacccactggggacctgctgctggtgggcacccaacagctgggggagttccagtgctggtcactagaggagggcttccagcagctggtagccagctactgcccagaggtggtggaggacggggtggcagaccaaacagatacggtgcccacaccccggcctggagcgtgcatcaccaacagtgcccgggaaaggaagatcaactcatccctgcagctcccagaccgcgtgctgaacttcctcaaggaccacttcctgatggacgggcaggtccgaagccgcatgctgctgctgcagccccaggctcgctaccagcgcgtggctgtacaccgcgtccctggcctgcaccacacctacgatgtcctcttcctgggcactggtgacggccggctccacaaggcagtgagcgtgggcccccgggtgcacatcattgaggagctgcagatcttctcatcgggacagcccgtgcagaatctgctcctggacacccacagggggctgctgtatgcggcctcacactcgggcgtagtccaggtgcccatggccaactgcagcctgtacaggagctgtggggactgcctcctcgcccgggacccctactgtgcttggagcggctccagctgcaagcacgtcagcctctaccagcctcagctggccaccaggccgtggatccaggacatcgagggagccagcgccaaggacctttgcagcgcgtcttcggttgtgtccccgtcttttgtaccaacaggggagaagccatgtgagcaagtccagttccagcccaacacagtgaacactttggcctgcccgctcctctccaacctggcgacccgactctggctacgcaacggggcccccgtcaatgcctcggcctcctgccacgtgctacccactggggacctgctgctggtgggcacccaacagctgggggagttccagtgctggtcactagaggagggcttccagcagctggtagccagctactgcccagaggtggtggaggacggggtggcaaaccaaacagatgagggtggcagtgtacccgtcattatcagcacatcgcgtgtgagtgcaccagctggtggcaaggccagctggggtgcagacaggtcctactggaaggagttcctggtgatgtgcacgctctttgtgctggccgtgctgctcccagttttattcttgctctaccggcaccggaacagcatgaaagtcttcctgaagcagggggaatgtgccagcgtgcaccccaagacctgccctgtggtgctgccccctgagacccgcccactcaacggcctagggccccctagcaccccgctcgatcaccgagggtaccagtccccccgaaggaccgcgcacctggtgcatgacccgcaagcccggtgcctgaagcggatccagacatga

SEQ ID NO: 171 - protein, 1158 aa, Homo sapiens
MPSQGRVESCSCRSGGGGPRGDSGADRGAELPPVSPAEPPEPEPRDTVAPALRMLRTAMGLRSWLAAPWGALPPRPPLLLLLLLLLLLQPPPPTWALSPRISLPLGSEERPFLRFEAEHISNYTALLLSRDGRTLYVGAREALFALSSNLSFLPGGEYQELLWGADAEKKQQCSFKGKDPQRDCQNYIKILLPLSGSHLFTCGTAAFSPMCTYINMENFTLARDEKGNVLLEDGKGRCPFDPNFKSTALVVDGELYTGTVSSFQGNDPAISRSQSLRPTKTESSLNWLQDPAFVASAYIPESLGSLQGDDDKIYFFFSETGQEFEFFENTIVSRIARICKGDEGGERVLQQRWTSFLKAQLLCSRPDDGFPFNVLQDVFTLSPSPQDWRDTLFYGVFTSQWHRGTTEGSAVCVFTMKDVQRVFSGLYKEVNRETQQWYTVTHPVPTPRPGACITNSARERKINSSLQLPDRVLNFLKDHFLMDGQVRSRMLLLQPQARYQRVAVHRVPGLHHTYDVLFLGTGDGRLHKAVSVGPRVHIIEELQIFSSGQPVQNLLLDTHRGLLYAASHSGVVQVPMANCSLYRSCGDCLLARDPYCAWSGSSCKHVSLYQPQLATRPWIQDIEGASAKDLCSASSVVSPSFVPTGEKPCEQVQFQPNTVNTLACPLLSNLATRLWLRNGAPVNASASCHVLPTGDLLLVGTQQLGEFQCWSLEEGFQQLVASYCPEVVEDGVADQTDTVPTPRPGACITNSARERKINSSLQLPDRVLNFLKDHFLMDGQVRSRMLLLQPQARYQRVAVHRVPGLHHTYDVLFLGTGDGRLHKAVSVGPRVHIIEELQIFSSGQPVQNLLLDTHRGLLYAASHSGVVQVPMANCSLYRSCGDCLLARDPYCAWSGSSCKHVSLYQPQLATRPWIQDIEGASAKDLCSASSVVSPSFVPTGEKPCEQVQFQPNTVNTLACPLLSNLATRLWLRNGAPVNASASCHVLPTGDLLLVGTQQLGEFQCWSLEEGFQQLVASYCPEVVEDGVANQTDEGGSVPVIISTSRVSAPAGGKASWGADRSYWKEFLVMCTLFVLAVLLPVLFLLYRHRNSMKVFLKQGECASVHPKTCPVVLPPETRPLNGLGPPSTPLDHRGYQSPRRTAHLVHDPQARCLKRIQT

SEQ ID NO: 172 - DNA, 2673 bp, Homo sapiens
  CDS (1)...(2673)
atgcccagccagggcagggtggagagctgcagctgcaggtccggaggcgggggcccccggggcgactcgggggcggaccgcggggcggagctgccgcccgtgagtccggccgagccacctgagcccgagccgcgggacaccgtcgctcctgctctccgaatgctgcgcaccgcgatgggcctgaggagctggctcgccgccccatggggcgcgctgccgcctcggccaccgctgctgctgctcctgctgctgctgctcctgctgcagccgccgcctccgacctgggcgctcagcccccggatcagcctgcctctgggctctgaagagcggccattcctcagattcgaagctgaacacatctccaactacacagcccttctgctgagcagggatggcaggaccctgtacgtgggtgctcgagaggccctctttgcactcagtagcaacctcagcttcctgccaggcggggagtaccaggagctgctttggggtgcagacgcagagaagaaacagcagtgcagcttcaagggcaaggacccacagcgcgactgtcaaaactacatcaagatcctcctgccgctcagcggcagtcacctgttcacctgtggcacagcagccttcagccccatgtgtacctacatcaacatggagaacttcaccctggcaagggacgagaaggggaatgtcctcctggaagatggcaagggccgttgtcccttcgacccgaatttcaagtccactgccctggtggttgatggcgagctctacactggaacagtcagcagcttccaagggaatgacccggccatctcgcggagccaaagccttcgccccaccaagaccgagagctccctcaactggctgcaagacccagcttttgtggcctcagcctacattcctgagagcctgggcagcttgcaaggcgatgatgacaagatctactttttcttcagcgagactggccaggaatttgagttctttgagaacaccattgtgtcccgcattgcccgcatctgcaagggcgatgagggtggagagcgggtgctacagcagcgctggacctccttcctcaaggcccagctgctgtgctcacggcccgacgatggcttccccttcaacgtgctgcaggatgtcttcacgctgagccccagcccccaggactggcgtgacacccttttctatggggtcttcacttcccagtggcacaggggaactacagaaggctctgccgtctgtgtcttcacaatgaaggatgtgcagagagtcttcagcggcctctacaaggaggtgaaccgtgagacacagcagtggtacaccgtgacccacccggtgcccacaccccggcctggagcgtgcatcaccaacagtgcccgggaaaggaagatcaactcatccctgcagctcccagaccgcgtgctgaacttcctcaaggaccacttcctgatggacgggcaggtccgaagccgcatgctgctgctgcagccccaggctcgctaccagcgcgtggctgtacaccgcgtccctggcctgcaccacacctacgatgtcctcttcctgggcactggtgacggccggctccacaaggcagtgagcgtgggcccccgggtgcacatcattgaggagctgcagatcttctcatcgggacagcccgtgcagaatctgctcctggacacccacagggggctgctgtatgcggcctcacactcgggcgtagtccaggtgcccatggccaactgcagcctgtacaggagctgtggggactgcctcctcgcccgggacccctactgtgcttggagcggctccagctgcaagcacgtcagcctctaccagcctcagctggccaccaggccgtggatccaggacatcgagggagccagcgccaaggacctttgcagcgcgtcttcggttgtgtccccgtcttttgtaccaacaggggagaagccatgtgagcaagtccagttccagcccaacacagtgaacactttggcctgcccgctcctctccaacctggcgacccgactctggctacgcaacggggcccccgtcaatgcctcggcctcctgccacgtgctacccactggggacctgctgctggtgggcacccaacagctgggggagttccagtgctggtcactagaggagggcttccagcagctggtagccagctactgcccagaggtggtggaggacggggtggcagaccaaacagatgagggtggcagtgtacccgtcattatcagcacatcgcgtgtgagtgcaccagctggtggcaaggccagctggggtgcagacaggtcctactggaaggagttcctggtgatgtgcacgctctttgtgctggccgtgctgctcccagttttattcttgctctaccggcaccggaacagcatgaaagtcttcctgaagcagggggaatgtgccagcgtgcaccccaagacctgccctgtggtgctgccccctgagacccgcccactcaacggcctagggccccctagcaccccgctcgatcaccgagggtaccagtccctgtcagacagccccccgggggcccgagtcttcactgagtcagagaagaggccactcagcatccaagacagcttcgtggaggtatccccagtgtgcccccggccccgggtccgccttggctcggagatccgtgactctgtggtgtga

SEQ ID NO: 173 - protein, 890 aa, Homo sapiens
MPSQGRVESCSCRSGGGGPRGDSGADRGAELPPVSPAEPPEPEPRDTVAPALRMLRTAMGLRSWLAAPWGALPPRPPLLLLLLLLLLLQPPPPTWALSPRISLPLGSEERPFLRFEAEHISNYTALLLSRDGRTLYVGAREALFALSSNLSFLPGGEYQELLWGADAEKKQQCSFKGKDPQRDCQNYIKILLPLSGSHLFTCGTAAFSPMCTYINMENFTLARDEKGNVLLEDGKGRCPFDPNFKSTALVVDGELYTGTVSSFQGNDPAISRSQSLRPTKTESSLNWLQDPAFVASAYIPESLGSLQGDDDKIYFFFSETGQEFEFFENTIVSRIARICKGDEGGERVLQQRWTSFLKAQLLCSRPDDGFPFNVLQDVFTLSPSPQDWRDTLFYGVFTSQWHRGTTEGSAVCVFTMKDVQRVFSGLYKEVNRETQQWYTVTHPVPTPRPGACITNSARERKINSSLQLPDRVLNFLKDHFLMDGQVRSRMLLLQPQARYQRVAVHRVPGLHHTYDVLFLGTGDGRLHKAVSVGPRVHIIEELQIFSSGQPVQNLLLDTHRGLLYAASHSGVVQVPMANCSLYRSCGDCLLARDPYCAWSGSSCKHVSLYQPQLATRPWIQDIEGASAKDLCSASSVVSPSFVPTGEKPCEQVQFQPNTVNTLACPLLSNLATRLWLRNGAPVNASASCHVLPTGDLLLVGTQQLGEFQCWSLEEGFQQLVASYCPEVVEDGVADQTDEGGSVPVIISTSRVSAPAGGKASWGADRSYWKEFLVMCTLFVLAVLLPVLFLLYRHRNSMKVFLKQGECASVHPKTCPVVLPPETRPLNGLGPPSTPLDHRGYQSLSDSPPGARVFTESEKRPLSIQDSFVEVSPVCPRPRVRLGSEIRDSVV

SEQ ID NO: 174 - DNA, 3558 bp, Homo sapiens
  CDS (1)...(3558)
atgcccagccagggcagggtggagagctgcagctgcaggtccggaggcgggggcccccggggcgactcgggggcggaccgcggggcggagctgccgcccgtgagtccggccgagccacctgagcccgagccgcgggacaccgtcgctcctgctctccgaatgctgcgcaccgcgatgggcctgaggagctggctcgccgccccatggggcgcgctgccgcctcggccaccgctgctgctgctcctgctgctgctgctcctgctgcagccgccgcctccgacctgggcgctcagcccccggatcagcctgcctctgggctctgaagagcggccattcctcagattcgaagctgaacacatctccaactacacagcccttctgctgagcagggatggcaggaccctgtacgtgggtgctcgagaggccctctttgcactcagtagcaacctcagcttcctgccaggcggggagtaccaggagctgctttggggtgcagacgcagagaagaaacagcagtgcagcttcaagggcaaggacccacagcgcgactgtcaaaactacatcaagatcctcctgccgctcagcggcagtcacctgttcacctgtggcacagcagccttcagccccatgtgtacctacatcaacatggagaacttcaccctggcaagggacgagaaggggaatgtcctcctggaagatggcaagggccgttgtcccttcgacccgaatttcaagtccactgccctggtggttgatggcgagctctacactggaacagtcagcagcttccaagggaatgacccggccatctcgcggagccaaagccttcgccccaccaagaccgagagctccctcaactggctgcaagacccagcttttgtggcctcagcctacattcctgagagcctgggcagcttgcaaggcgatgatgacaagatctactttttcttcagcgagactggccaggaatttgagttctttgagaacaccattgtgtcccgcattgcccgcatctgcaagggcgatgagggtggagagcgggtgctacagcagcgctggacctccttcctcaaggcccagctgctgtgctcacggcccgacgatggcttccccttcaacgtgctgcaggatgtcttcacgctgagccccagcccccaggactggcgtgacacccttttctatggggtcttcacttcccagtggcacaggggaactacagaaggctctgccgtctgtgtcttcacaatgaaggatgtgcagagagtcttcagcggcctctacaaggaggtgaaccgtgagacacagcagtggtacaccgtgacccacccggtgcccacaccccggcctggagcgtgcatcaccaacagtgcccgggaaaggaagatcaactcatccctgcagctcccagaccgcgtgctgaacttcctcaaggaccacttcctgatggacgggcaggtccgaagccgcatgctgctgctgcagccccaggctcgctaccagcgcgtggctgtacaccgcgtccctggcctgcaccacacctacgatgtcctcttcctgggcactggtgacggccggctccacaaggcagtgagcgtgggcccccgggtgcacatcattgaggagctgcagatcttctcatcgggacagcccgtgcagaatctgctcctggacacccacagggggctgctgtatgcggcctcacactcgggcgtagtccaggtgcccatggccaactgcagcctgtacaggagctgtggggactgcctcctcgcccgggacccctactgtgcttggagcggctccagctgcaagcacgtcagcctctaccagcctcagctggccaccaggccgtggatccaggacatcgagggagccagcgccaaggacctttgcagcgcgtcttcggttgtgtccccgtcttttgtaccaacaggggagaagccatgtgagcaagtccagttccagcccaacacagtgaacactttggcctgcccgctcctctccaacctggcgacccgactctggctacgcaacggggcccccgtcaatgcctcggcctcctgccacgtgctacccactggggacctgctgctggtgggcacccaacagctgggggagttccagtgctggtcactagaggagggcttccagcagctggtagccagctactgcccagaggtggtggaggacggggtggcagaccaaacagatacggtgcccacaccccggcctggagcgtgcatcaccaacagtgcccgggaaaggaagatcaactcatccctgcagctcccagaccgcgtgctgaacttcctcaaggaccacttcctgatggacgggcaggtccgaagccgcatgctgctgctgcagccccaggctcgctaccagcgcgtggctgtacaccgcgtccctggcctgcaccacacctacgatgtcctcttcctgggcactggtgacggccggctccacaaggcagtgagcgtgggcccccgggtgcacatcattgaggagctgcagatcttctcatcgggacagcccgtgcagaatctgctcctggacacccacagggggctgctgtatgcggcctcacactcgggcgtagtccaggtgcccatggccaactgcagcctgtacaggagctgtggggactgcctcctcgcccgggacccctactgtgcttggagcggctccagctgcaagcacgtcagcctctaccagcctcagctggccaccaggccgtggatccaggacatcgagggagccagcgccaaggacctttgcagcgcgtcttcggttgtgtccccgtcttttgtaccaacaggggagaagccatgtgagcaagtccagttccagcccaacacagtgaacactttggcctgcccgctcctctccaacctggcgacccgactctggctacgcaacggggcccccgtcaatgcctcggcctcctgccacgtgctacccactggggacctgctgctggtgggcacccaacagctgggggagttccagtgctggtcactagaggagggcttccagcagctggtagccagctactgcccagaggtggtggaggacggggtggcaaaccaaacagatgagggtggcagtgtacccgtcattatcagcacatcgcgtgtgagtgcaccagctggtggcaaggccagctggggtgcagacaggtcctactggaaggagttcctggtgatgtgcacgctctttgtgctggccgtgctgctcccagttttattcttgctctaccggcaccggaacagcatgaaagtcttcctgaagcagggggaatgtgccagcgtgcaccccaagacctgccctgtggtgctgccccctgagacccgcccactcaacggcctagggccccctagcaccccgctcgatcaccgagggtaccagtccctgtcagacagccccccgggggcccgagtcttcactgagtcagagaagaggccactcagcatccaagacagcttcgtggaggtatccccagtgtgcccccggccccgggtccgccttggctcggagatccgtgactctgtggtgtga

SEQ ID NO: 175 - protein, 1185 aa, Homo sapiens [sequence omitted]

SEQ ID NO: 176 - DNA, 2145 bp, Homo sapiens
  CDS (1)...(2145)
atgctgcgcaccgcgatgggcctgaggagctggctcgccgccccatggggcgcgctgccgcctcggccaccgctgctgctgctcctgctgctgctgctcctgctgcagccgccgcctccgacctgggcgctcagcccccggatcagcctgcctctgggctctgaagagcggccattcctcagattcgaagctgaacacatctccaactacacagcccttctgctgagcagggatggcaggaccctgtacgtgggtgctcgagaggccctctttgcactcagtagcaacctcagcttcctgccaggcggggagtaccaggagctgctttggggtgcagacgcagagaagaaacagcagtgcagcttcaagggcaaggacccacagcgcgactgtcaaaactacatcaagatcctcctgccgctcagcggcagtcacctgttcacctgtggcacagcagccttcagccccatgtgtacctacatcaacatggagaacttcaccctggcaagggacgagaaggggaatgtcctcctggaagatggcaagggccgttgtcccttcgacccgaatttcaagtccactgccctggtggttgatggcgagctctacactggaacagtcagcagcttccaagggaatgacccggccatctcgcggagccaaagccttcgccccaccaagaccgagagctccctcaactggctgcaagacccagcttttgtggcctcagcctacattcctgagagcctgggcagcttgcaaggcgatgatgacaagatctactttttcttcagcgagactggccaggaatttgagttctttgagaacaccattgtgtcccgcattgcccgcatctgcaagggcgatgagggtggagagcgggtgctacagcagcgctggacctccttcctcaaggcccagctgctgtgctcacggcccgacgatggcttccccttcaacgtgctgcaggatgtcttcacgctgagccccagcccccaggactggcgtgacacccttttctatggggtcttcacttcccagtggcacaggggaactacagaaggctctgccgtctgtgtcttcacaatgaaggatgtgcagagagtcttcagcggcctctacaaggaggtgaaccgtgagacacagcagtggtacaccgtgacccacccggtgcccacaccccggcctggagcgtgcatcaccaacagtgcccgggaaaggaagatcaactcatccctgcagctcccagaccgcgtgctgaacttcctcaaggaccacttcctgatggacgggcaggtccgaagccgcatgctgctgctgcagccccaggctcgctaccagcgcgtggctgtacaccgcgtccctggcctgcaccacacctacgatgtcctcttcctgggcactggtgacggccggctccacaaggcagtgagcgtgggcccccgggtgcacatcattgaggagctgcagatcttctcatcgggacagcccgtgcagaatctgctcctggacacccacagggggctgctgtatgcggcctcacactcgggcgtagtccaggtgcccatggccaactgcagcctgtacaggagctgtggggactgcctcctcgcccgggacccctactgtgcttggagcggctccagctgcaagcacgtcagcctctaccagcctcagctggccaccaggccgtggatccaggacatcgagggagccagcgccaaggacctttgcagcgcgtcttcggttgtgtccccgtcttttgtaccaacaggggagaagccatgtgagcaagtccagttccagcccaacacagtgaacactttggcctgcccgctcctctccaacctggcgacccgactctggctacgcaacggggcccccgtcaatgcctcggcctcctgccacgtgctacccactggggacctgctgctggtgggcacccaacagctgggggagttccagtgctggtcactagaggagggcttccagcagctggtagccagctactgcccagaggtggtggaggacggggtggcagaccaaacagatgagggtggcagtgtacccgtcattatcagcacatcgcgtgtgagtgcacccagcacccggctggggcctgtccctggatgcaggctactctag

SEQ ID NO: 177 - protein, 714 aa, Homo sapiens
MLRTAMGLRSWLAAPWGALPPRPPLLLLLLLLLLLQPPPPTWALSPRISLPLGSEERPFLRFEAEHISNYTALLLSRDGRTLYVGAREALFALSSNLSFLPGGEYQELLWGADAEKKQQCSFKGKDPQRDCQNYIKILLPLSGSHLFTCGTAAFSPMCTYINMENFTLARDEKGNVLLEDGKGRCPFDPNFKSTALVVDGELYTGTVSSFQGNDPAISRSQSLRPTKTESSLNWLQDPAFVASAYIPESLGSLQGDDDKIYFFFSETGQEFEFFENTIVSRIARICKGDEGGERVLQQRWTSFLKAQLLCSRPDDGFPFNVLQDVFTLSPSPQDWRDTLFYGVFTSQWHRGTTEGSAVCVFTMKDVQRVFSGLYKEVNRETQQWYTVTHPVPTPRPGACITNSARERKINSSLQLPDRVLNFLKDHFLMDGQVRSRMLLLQPQARYQRVAVHRVPGLHHTYDVLFLGTGDGRLHKAVSVGPRVHIIEELQIFSSGQPVQNLLLDTHRGLLYAASHSGVVQVPMANCSLYRSCGDCLLARDPYCAWSGSSCKHVSLYQPQLATRPWIQDIEGASAKDLCSASSVVSPSFVPTGEKPCEQVQFQPNTVNTLACPLLSNLATRLWLRNGAPVNASASCHVLPTGDLLLVGTQQLGEFQCWSLEEGFQQLVASYCPEVVEDGVADQTDEGGSVPVIISTSRVSAPSTRLGPVPGCRLL

SEQ ID NO: 178 - DNA, 2985 bp, Homo sapiens
  CDS (1)...(2985)
atgctgcgcaccgcgatgggcctgaggagctggctcgccgccccatggggcgcgctgccgcctcggccaccgctgctgctgctcctgctgctgctgctcctgctgcagccgccgcctccgacctgggcgctcagcccccggatcagcctgcctctgggctctgaagagcggccattcctcagattcgaagctgaacacatctccaactacacagcccttctgctgagcagggatggcaggaccctgtacgtgggtgctcgagaggccctctttgcactcagtagcaacctcagcttcctgccaggcggggagtaccaggagctgctttggggtgcagacgcagagaagaaacagcagtgcagcttcaagggcaaggacccacagcgcgactgtcaaaactacatcaagatcctcctgccgctcagcggcagtcacctgttcacctgtggcacagcagccttcagccccatgtgtacctacatcaacatggagaacttcaccctggcaagggacgagaaggggaatgtcctcctggaagatggcaagggccgttgtcccttcgacccgaatttcaagtccactgccctggtggttgatggcgagctctacactggaacagtcagcagcttccaagggaatgacccggccatctcgcggagccaaagccttcgccccaccaagaccgagagctccctcaactggctgcaagacccagcttttgtggcctcagcctacattcctgagagcctgggcagcttgcaaggcgatgatgacaagatctactttttcttcagcgagactggccaggaatttgagttctttgagaacaccattgtgtcccgcattgcccgcatctgcaagggcgatgagggtggagagcgggtgctacagcagcgctggacctccttcctcaaggcccagctgctgtgctcacggcccgacgatggcttccccttcaacgtgctgcaggatgtcttcacgctgagccccagcccccaggactggcgtgacacccttttctatggggtcttcacttcccagtggcacaggggaactacagaaggctctgccgtctgtgtcttcacaatgaaggatgtgcagagagtcttcagcggcctctacaaggaggtgaaccgtgagacacagcagtggtacaccgtgacccacccggtgcccacaccccggcctggagcgtgcatcaccaacagtgcccgggaaaggaagatcaactcatccctgcagctcccagaccgcgtgctgaacttcctcaaggaccacttcctgatggacgggcaggtccgaagccgcatgctgctgctgcagccccaggctcgctaccagcgcgtggctgtacaccgcgtccctggcctgcaccacacctacgatgtcctcttcctgggcactggtgacggccggctccacaaggcagtgagcgtgggcccccgggtgcacatcattgaggagctgcagatcttctcatcgggacagcccgtgcagaatctgctcctggacacccacagggggctgctgtatgcggcctcacactcgggcgtagtccaggtgcccatggccaactgcagcctgtacaggagctgtggggactgcctcctcgcccgggacccctactgtgcttggagcggctccagctgcaagcacgtcagcctctaccagcctcagctggccaccaggccgtggatccaggacatcgagggagccagcgccaaggacctttgcagcgcgtcttcggttgtgtccccgtcttttgtaccaacaggggagaagccatgtgagcaagtccagttccagcccaacacagtgaacactttggcctgcccgctcctctccaacctggcgacccgactctggctacgcaacggggcccccgtcaatgcctcggcctcctgccacgtgctacccactggggacctgctgctggtgggcacccaacagctgggggagttccagtgctggtcactagaggagggcttccagcagctggtagccagctactgcccagaggtggtggaggacggggtggcagaccaaacagatacggtgcccacaccccggcctggagcgtgcatcaccaacagtgcccgggaaaggaagatcaactcatccctgcagctcccagaccgcgtgctgaacttcctcaaggaccacttcctgatggacgggcaggtccgaagccgcatgctgctgctgcagccccaggctcgctaccagcgcgtggctgtacaccgcgtccctggcctgcaccacacctacgatgtcctcttcctgggcactggtgacggccggctccacaaggcagtgagcgtgggcccccgggtgcacatcattgaggagctgcagatcttctcatcgggacagcccgtgcagaatctgctcctggacacccacagggggctgctgtatgcggcctcacactcgggcgtagtccaggtgcccatggccaactgcagcctgtacaggagctgtggggactgcctcctcgcccgggacccctactgtgcttggagcggctccagctgcaagcacgtcagcctctaccagcctcagctggccaccaggccgtggatccaggacatcgagggagccagcgccaaggacctttgcagcgcgtcttcggttgtgtccccgtcttttgtaccaacaggggagaagccatgtgagcaagtccagttccagcccaacacagtgaacactttggcctgcccgctcctctccaacctggcgacccgactctggctacgcaacggggcccccgtcaatgcctcggcctcctgccacgtgctacccactggggacctgctgctggtgggcactggagtagcaccttccacgaccaggagaggcactggggaggggtcacagggatgccacccgggcagacctgaggaagagatggaggtggacgtgtcagcacccggctggggcctgtccctggatgcaggctactctagggcacctgtcccgccttga

SEQ ID NO: 179 - protein, 994 aa, Homo sapiens
MLRTAMGLRSWLAAPWGALPPRPPLLLLLLLLLLLQPPPPTWALSPRISLPLGSEERPFLRFEAEHISNYTALLLSRDGRTLYVGAREALFALSSNLSFLPGGEYQELLWGADAEKKQQCSFKGKDPQRDCQNYIKILLPLSGSHLFTCGTAAFSPMCTYINMENFTLARDEKGNVLLEDGKGRCPFDPNFKSTALVVDGELYTGTVSSFQGNDPAISRSQSLRPTKTESSLNWLQDPAFVASAYIPESLGSLQGDDDKIYFFFSETGQEFEFFENTIVSRIARICKGDEGGERVLQQRWTSFLKAQLLCSRPDDGFPFNVLQDVFTLSPSPQDWRDTLFYGVFTSQWHRGTTEGSAVCVFTMKDVQRVFSGLYKEVNRETQQWYTVTHPVPTPRPGACITNSARERKINSSLQLPDRVLNFLKDHFLMDGQVRSRMLLLQPQARYQRVAVHRVPGLHHTYDVLFLGTGDGRLHKAVSVGPRVHIIEELQIFSSGQPVQNLLLDTHRGLLYAASHSGVVQVPMANCSLYRSCGDCLLARDPYCAWSGSSCKHVSLYQPQLATRPWIQDIEGASAKDLCSASSVVSPSFVPTGEKPCEQVQFQPNTVNTLACPLLSNLATRLWLRNGAPVNASASCHVLPTGDLLLVGTQQLGEFQCWSLEEGFQQLVASYCPEVVEDGVADQTDTVPTPRPGACITNSARERKINSSLQLPDRVLNFLKDHFLMDGQVRSRMLLLQPQARYQRVAVHRVPGLHHTYDVLFLGTGDGRLHKAVSVGPRVHIIEELQIFSSGQPVQNLLLDTHRGLLYAASHSGVVQVPMANCSLYRSCGDCLLARDPYCAWSGSSCKHVSLYQPQLATRPWIQDIEGASAKDLCSASSVVSPSFVPTGEKPCEQVQFQPNTVNTLACPLLSNLATRLWLRNGAPVNASASCHVLPTGDLLLVGTGVAPSTTRRGTGEGSQGCHPGRPEEEMEVDVSAPGWGLSLDAGYSRAPVPP

SEQ ID NO: 180 - DNA, 3030 bp, Homo sapiens
  CDS (1)...(3030)
atgctgcgcaccgcgatgggcctgaggagctggctcgccgccccatggggcgcgctgccgcctcggccaccgctgctgctgctcctgctgctgctgctcctgctgcagccgccgcctccgacctgggcgctcagcccccggatcagcctgcctctgggctctgaagagcggccattcctcagattcgaagctgaacacatctccaactacacagcccttctgctgagcagggatggcaggaccctgtacgtgggtgctcgagaggccctctttgcactcagtagcaacctcagcttcctgccaggcggggagtaccaggagctgctttggggtgcagacgcagagaagaaacagcagtgcagcttcaagggcaaggacccacagcgcgactgtcaaaactacatcaagatcctcctgccgctcagcggcagtcacctgttcacctgtggcacagcagccttcagccccatgtgtacctacatcaacatggagaacttcaccctggcaagggacgagaaggggaatgtcctcctggaagatggcaagggccgttgtcccttcgacccgaatttcaagtccactgccctggtggttgatggcgagctctacactggaacagtcagcagcttccaagggaatgacccggccatctcgcggagccaaagccttcgccccaccaagaccgagagctccctcaactggctgcaagacccagcttttgtggcctcagcctacattcctgagagcctgggcagcttgcaaggcgatgatgacaagatctactttttcttcagcgagactggccaggaatttgagttctttgagaacaccattgtgtcccgcattgcccgcatctgcaagggcgatgagggtggagagcgggtgctacagcagcgctggacctccttcctcaaggcccagctgctgtgctcacggcccgacgatggcttccccttcaacgtgctgcaggatgtcttcacgctgagccccagcccccaggactggcgtgacacccttttctatggggtcttcacttcccagtggcacaggggaactacagaaggctctgccgtctgtgtcttcacaatgaaggatgtgcagagagtcttcagcggcctctacaaggaggtgaaccgtgagacacagcagtggtacaccgtgacccacccggtgcccacaccccggcctggagcgtgcatcaccaacagtgcccgggaaaggaagatcaactcatccctgcagctcccagaccgcgtgctgaacttcctcaaggaccacttcctgatggacgggcaggtccgaagccgcatgctgctgctgcagccccaggctcgctaccagcgcgtggctgtacaccgcgtccctggcctgcaccacacctacgatgtcctcttcctgggcactggtgacggccggctccacaaggcagtgagcgtgggcccccgggtgcacatcattgaggagctgcagatcttctcatcgggacagcccgtgcagaatctgctcctggacacccacagggggctgctgtatgcggcctcacactcgggcgtagtccaggtgcccatggccaactgcagcctgtacaggagctgtggggactgcctcctcgcccgggacccctactgtgcttggagcggctccagctgcaagcacgtcagcctctaccagcctcagctggccaccaggccgtggatccaggacatcgagggagccagcgccaaggacctttgcagcgcgtcttcggttgtgtccccgtcttttgtaccaacaggggagaagccatgtgagcaagtccagttccagcccaacacagtgaacactttggcctgcccgctcctctccaacctggcgacccgactctggctacgcaacggggcccccgtcaatgcctcggcctcctgccacgtgctacccactggggacctgctgctggtgggcacccaacagctgggggagttccagtgctggtcactagaggagggcttccagcagctggtagccagctactgcccagaggtggtggaggacggggtggcagaccaaacagatacggtgcccacaccccggcctggagcgtgcatcaccaacagtgcccgggaaaggaagatcaactcatccctgcagctcccagaccgcgtgctgaacttcctcaaggaccacttcctgatggacgggcaggtccgaagccgcatgctgctgctgcagccccaggctcgctaccagcgcgtggctgtacaccgcgtccctggcctgcaccacacctacgatgtcctcttcctgggcactggtgacggccggctccacaaggcagtgagcgtgggcccccgggtgcacatcattgaggagctgcagatcttctcatcgggacagcccgtgcagaatctgctcctggacacccacagggggctgctgtatgcggcctcacactcgggcgtagtccaggtgcccatggccaactgcagcctgtacaggagctgtggggactgcctcctcgcccgggacccctactgtgcttggagcggctccagctgcaagcacgtcagcctctaccagcctcagctggccaccaggccgtggatccaggacatcgagggagccagcgccaaggacctttgcagcgcgtcttcggttgtgtccccgtcttttgtaccaacaggggagaagccatgtgagcaagtccagttccagcccaacacagtgaacactttggcctgcccgctcctctccaacctggcgacccgactctggctacgcaacggggcccccgtcaatgcctcggcctcctgccacgtgctacccactggggacctgctgctggtgggcacccaacagctgggggagttccagtgctggtcactagaggagggcttccagcagctggtagccagctactgcccagaggtggtggaggacggggtggcaaaccaaacagatgagggtggcagtgtacccgtcattatcagcacatcgcgtgtgagtgcacccagcacccggctggggcctgtccctggatgcaggctactctag

SEQ ID NO: 181 - protein, 1009 aa, Homo sapiens
MLRTAMGLRSWLAAPWGALPPRPPLLLLLLLLLLLQPPPPTWALSPRISLPLGSEERPFLRFEAEHISNYTALLLSRDGRTLYVGAREALFALSSNLSFLPGGEYQELLWGADAEKKQQCSFKGKDPQRDCQNYIKILLPLSGSHLFTCGTAAFSPMCTYINMENFTLARDEKGNVLLEDGKGRCPFDPNFKSTALVVDGELYTGTVSSFQGNDPAISRSQSLRPTKTESSLNWLQDPAFVASAYIPESLGSLQGDDDKIYFFFSETGQEFEFFENTIVSRIARICKGDEGGERVLQQRWTSFLKAQLLCSRPDDGFPFNVLQDVFTLSPSPQDWRDTLFYGVFTSQWHRGTTEGSAVCVFTMKDVQRVFSGLYKEVNRETQQWYTVTHPVPTPRPGACITNSARERKINSSLQLPDRVLNFLKDHFLMDGQVRSRMLLLQPQARYQRVAVHRVPGLHHTYDVLFLGTGDGRLHKAVSVGPRVHIIEELQIFSSGQPVQNLLLDTHRGLLYAASHSGVVQVPMANCSLYRSCGDCLLARDPYCAWSGSSCKHVSLYQPQLATRPWIQDIEGASAKDLCSASSVVSPSFVPTGEKPCEQVQFQPNTVNTLACPLLSNLATRLWLRNGAPVNASASCHVLPTGDLLLVGTQQLGEFQCWSLEEGFQQLVASYCPEVVEDGVADQTDTVPTPRPGACITNSARERKINSSLQLPDRVLNFLKDHFLMDGQVRSRMLLLQPQARYQRVAVHRVPGLHHTYDVLFLGTGDGRLHKAVSVGPRVHIIEELQIFSSGQPVQNLLLDTHRGLLYAASHSGVVQVPMANCSLYRSCGDCLLARDPYCAWSGSSCKHVSLYQPQLATRPWIQDIEGASAKDLCSASSVVSPSFVPTGEKPCEQVQFQPNTVNTLACPLLSNLATRLWLRNGAPVNASASCHVLPTGDLLLVGTQQLGEFQCWSLEEGFQQLVASYCPEVVEDGVANQTDEGGSVPVIISTSRVSAPSTRLGPVPGCRLL

SEQ ID NO: 182 - DNA, 2358 bp, Homo sapiens
  CDS (1)...(2358)
atgctgcgcaccgcgatgggcctgaggagctggctcgccgccccatggggcgcgctgccgcctcggccaccgctgctgctgctcctgctgctgctgctcctgctgcagccgccgcctccgacctgggcgctcagcccccggatcagcctgcctctgggctctgaagagcggccattcctcagattcgaagctgaacacatctccaactacacagcccttctgctgagcagggatggcaggaccctgtacgtgggtgctcgagaggccctctttgcactcagtagcaacctcagcttcctgccaggcggggagtaccaggagctgctttggggtgcagacgcagagaagaaacagcagtgcagcttcaagggcaaggacccacagcgcgactgtcaaaactacatcaagatcctcctgccgctcagcggcagtcacctgttcacctgtggcacagcagccttcagccccatgtgtacctacatcaacatggagaacttcaccctggcaagggacgagaaggggaatgtcctcctggaagatggcaagggccgttgtcccttcgacccgaatttcaagtccactgccctggtggttgatggcgagctctacactggaacagtcagcagcttccaagggaatgacccggccatctcgcggagccaaagccttcgccccaccaagaccgagagctccctcaactggctgcaagacccagcttttgtggcctcagcctacattcctgagagcctgggcagcttgcaaggcgatgatgacaagatctactttttcttcagcgagactggccaggaatttgagttctttgagaacaccattgtgtcccgcattgcccgcatctgcaagggcgatgagggtggagagcgggtgctacagcagcgctggacctccttcctcaaggcccagctgctgtgctcacggcccgacgatggcttccccttcaacgtgctgcaggatgtcttcacgctgagccccagcccccaggactggcgtgacacccttttctatggggtcttcacttcccagtggcacaggggaactacagaaggctctgccgtctgtgtcttcacaatgaaggatgtgcagagagtcttcagcggcctctacaaggaggtgaaccgtgagacacagcagtggtacaccgtgacccacccggtgcccacaccccggcctggagcgtgcatcaccaacagtgcccgggaaaggaagatcaactcatccctgcagctcccagaccgcgtgctgaacttcctcaaggaccacttcctgatggacgggcaggtccgaagccgcatgctgctgctgcagccccaggctcgctaccagcgcgtggctgtacaccgcgtccctggcctgcaccacacctacgatgtcctcttcctgggcactggtgacggccggctccacaaggcagtgagcgtgggcccccgggtgcacatcattgaggagctgcagatcttctcatcgggacagcccgtgcagaatctgctcctggacacccacagggggctgctgtatgcggcctcacactcgggcgtagtccaggtgcccatggccaactgcagcctgtacaggagctgtggggactgcctcctcgcccgggacccctactgtgcttggagcggctccagctgcaagcacgtcagcctctaccagcctcagctggccaccaggccgtggatccaggacatcgagggagccagcgccaaggacctttgcagcgcgtcttcggttgtgtccccgtcttttgtaccaacaggggagaagccatgtgagcaagtccagttccagcccaacacagtgaacactttggcctgcccgctcctctccaacctggcgacccgactctggctacgcaacggggcccccgtcaatgcctcggcctcctgccacgtgctacccactggggacctgctgctggtgggcacccaacagctgggggagttccagtgctggtcactagaggagggcttccagcagctggtagccagctactgcccagaggtggtggaggacggggtggcagaccaaacagatgagggtggcagtgtacccgtcattatcagcacatcgcgtgtgagtgcaccagctggtggcaaggccagctggggtgcagacaggtcctactggaaggagttcctggtgatgtgcacgctctttgtgctggccgtgctgctcccagttttattcttgctctaccggcaccggaacagcatgaaagtcttcctgaagcagggggaatgtgccagcgtgcaccccaagacctgccctgtggtgctgccccctgagacccgccctcggtttcaccgtcaccgccgacgtcgaggtgactcaacggcctag

SEQ ID NO: 183 - protein, 785 aa, Homo sapiens
MLRTAMGLRSWLAAPWGALPPRPPLLLLLLLLLLLQPPPPTWALSPRISLPLGSEERPFLRFEAEHISNYTALLLSRDGRTLYVGAREALFALSSNLSFLPGGEYQELLWGADAEKKQQCSFKGKDPQRDCQNYIKILLPLSGSHLFTCGTAAFSPMCTYINMENFTLARDEKGNVLLEDGKGRCPFDPNFKSTALVVDGELYTGTVSSFQGNDPAISRSQSLRPTKTESSLNWLQDPAFVASAYIPESLGSLQGDDDKIYFFFSETGQEFEFFENTIVSRIARICKGDEGGERVLQQRWTSFLKAQLLCSRPDDGFPFNVLQDVFTLSPSPQDWRDTLFYGVFTSQWHRGTTEGSAVCVFTMKDVQRVFSGLYKEVNRETQQWYTVTHPVPTPRPGACITNSARERKINSSLQLPDRVLNFLKDHFLMDGQVRSRMLLLQPQARYQRVAVHRVPGLHHTYDVLFLGTGDGRLHKAVSVGPRVHIIEELQIFSSGQPVQNLLLDTHRGLLYAASHSGVVQVPMANCSLYRSCGDCLLARDPYCAWSGSSCKHVSLYQPQLATRPWIQDIEGASAKDLCSASSVVSPSFVPTGEKPCEQVQFQPNTVNTLACPLLSNLATRLWLRNGAPVNASASCHVLPTGDLLLVGTQQLGEFQCWSLEEGFQQLVASYCPEVVEDGVADQTDEGGSVPVIISTSRVSAPAGGKASWGADRSYWKEFLVMCTLFVLAVLLPVLFLLYRHRNSMKVFLKQGECASVHPKTCPVVLPPETRPRFHRHRRRRGDSTA

SEQ ID NO: 184 - DNA, 3294 bp, Homo sapiens
  CDS (1)...(3294)
atgctgcgcaccgcgatgggcctgaggagctggctcgccgccccatggggcgcgctgccgcctcggccaccgctgctgctgctcctgctgctgctgctcctgctgcagccgccgcctccgacctgggcgctcagcccccggatcagcctgcctctgggctctgaagagcggccattcctcagattcgaagctgaacacatctccaactacacagcccttctgctgagcagggatggcaggaccctgtacgtgggtgctcgagaggccctctttgcactcagtagcaacctcagcttcctgccaggcggggagtaccaggagctgctttggggtgcagacgcagagaagaaacagcagtgcagcttcaagggcaaggacccacagcgcgactgtcaaaactacatcaagatcctcctgccgctcagcggcagtcacctgttcacctgtggcacagcagccttcagccccatgtgtacctacatcaacatggagaacttcaccctggcaagggacgagaaggggaatgtcctcctggaagatggcaagggccgttgtcccttcgacccgaatttcaagtccactgccctggtggttgatggcgagctctacactggaacagtcagcagcttccaagggaatgacccggccatctcgcggagccaaagccttcgccccaccaagaccgagagctccctcaactggctgcaagacccagcttttgtggcctcagcctacattcctgagagcctgggcagcttgcaaggcgatgatgacaagatctactttttcttcagcgagactggccaggaatttgagttctttgagaacaccattgtgtcccgcattgcccgcatctgcaagggcgatgagggtggagagcgggtgctacagcagcgctggacctccttcctcaaggcccagctgctgtgctcacggcccgacgatggcttccccttcaacgtgctgcaggatgtcttcacgctgagccccagcccccaggactggcgtgacacccttttctatggggtcttcacttcccagtggcacaggggaactacagaaggctctgccgtctgtgtcttcacaatgaaggatgtgcagagagtcttcagcggcctctacaaggaggtgaaccgtgagacacagcagtggtacaccgtgacccacccggtgcccacaccccggcctggagcgtgcatcaccaacagtgcccgggaaaggaagatcaactcatccctgcagctcccagaccgcgtgctgaacttcctcaaggaccacttcctgatggacgggcaggtccgaagccgcatgctgctgctgcagccccaggctcgctaccagcgcgtggctgtacaccgcgtccctggcctgcaccacacctacgatgtcctcttcctgggcactggtgacggccggctccacaaggcagtgagcgtgggcccccgggtgcacatcattgaggagctgcagatcttctcatcgggacagcccgtgcagaatctgctcctggacacccacagggggctgctgtatgcggcctcacactcgggcgtagtccaggtgcccatggccaactgcagcctgtacaggagctgtggggactgcctcctcgcccgggacccctactgtgcttggagcggctccagctgcaagcacgtcagcctctaccagcctcagctggccaccaggccgtggatccaggacatcgagggagccagcgccaaggacctttgcagcgcgtcttcggttgtgtccccgtcttttgtaccaacaggggagaagccatgtgagcaagtccagttccagcccaacacagtgaacactttggcctgcccgctcctctccaacctggcgacccgactctggctacgcaacggggcccccgtcaatgcctcggcctcctgccacgtgctacccactggggacctgctgctggtgggcacccaacagctgggggagttccagtgctggtcactagaggagggcttccagcagctggtagccagctactgcccagaggtggtggaggacggggtggcagaccaaacagatacggtgcccacaccccggcctggagcgtgcatcaccaacagtgcccgggaaaggaagatcaactcatccctgcagctcccagaccgcgtgctgaacttcctcaaggaccacttcctgatggacgggcaggtccgaagccgcatgctgctgctgcagccccaggctcgctaccagcgcgtggctgtacaccgcgtccctggcctgcaccacacctacgatgtcctcttcctgggcactggtgacggccggctccacaaggcagtgagcgtgggcccccgggtgcacatcattgaggagctgcagatcttctcatcgggacagcccgtgcagaatctgctcctggacacccacagggggctgctgtatgcggcctcacactcgggcgtagtccaggtgcccatggccaactgcagcctgtacaggagctgtggggactgcctcctcgcccgggacccctactgtgcttggagcggctccagctgcaagcacgtcagcctctaccagcctcagctggccaccaggccgtggatccaggacatcgagggagccagcgccaaggacctttgcagcgcgtcttcggttgtgtccccgtcttttgtaccaacaggggagaagccatgtgagcaagtccagttccagcccaacacagtgaacactttggcctgcccgctcctctccaacctggcgacccgactctggctacgcaacggggcccccgtcaatgcctcggcctcctgccacgtgctacccactggggacctgctgctggtgggcacccaacagctgggggagttccagtgctggtcactagaggagggcttccagcagctggtagccagctactgcccagaggtggtggaggacggggtggcaaaccaaacagatgagggtggcagtgtacccgtcattatcagcacatcgcgtgtgagtgcaccagctggtggcaaggccagctggggtgcagacaggtcctactggaaggagttcctggtgatgtgcacgctctttgtgctggccgtgctgctcccagttttattcttgctctaccggcaccggaacagcatgaaagtcttcctgaagcagggggaatgtgccagcgtgcaccccaagacctgccctgtggtgctgccccctgagacccgccctcggtttcaccgtcaccgccgacgtcgaggtgcccgaaggaccgcgcacctggtgcatgacccgcaagcccggtgcctgaagcggatccagacatga

SEQ ID NO: 185 - protein, 1097 aa, Homo sapiens
MLRTAMGLRSWLAAPWGALPPRPPLLLLLLLLLLLQPPPPTWALSPRISLPLGSEERPFLRFEAEHISNYTALLLSRDGRTLYVGAREALFALSSNLSFLPGGEYQELLWGADAEKKQQCSFKGKDPQRDCQNYIKILLPLSGSHLFTCGTAAFSPMCTYINMENFTLARDEKGNVLLEDGKGRCPFDPNFKSTALVVDGELYTGTVSSFQGNDPAISRSQSLRPTKTESSLNWLQDPAFVASAYIPESLGSLQGDDDKIYFFFSETGQEFEFFENTIVSRIARICKGDEGGERVLQQRWTSFLKAQLLCSRPDDGFPFNVLQDVFTLSPSPQDWRDTLFYGVFTSQWHRGTTEGSAVCVFTMKDVQRVFSGLYKEVNRETQQWYTVTHPVPTPRPGACITNSARERKINSSLQLPDRVLNFLKDHFLMDGQVRSRMLLLQPQARYQRVAVHRVPGLHHTYDVLFLGTGDGRLHKAVSVGPRVHIIEELQIFSSGQPVQNLLLDTHRGLLYAASHSGVVQVPMANCSLYRSCGDCLLARDPYCAWSGSSCKHVSLYQPQLATRPWIQDIEGASAKDLCSASSVVSPSFVPTGEKPCEQVQFQPNTVNTLACPLLSNLATRLWLRNGAPVNASASCHVLPTGDLLLVGTQQLGEFQCWSLEEGFQQLVASYCPEVVEDGVADQTDTVPTPRPGACITNSARERKINSSLQLPDRVLNFLKDHFLMDGQVRSRMLLLQPQARYQRVAVHRVPGLHHTYDVLFLGTGDGRLHKAVSVGPRVHIIEELQIFSSGQPVQNLLLDTHRGLLYAASHSGVVQVPMANCSLYRSCGDCLLARDPYCAWSGSSCKHVSLYQPQLATRPWIQDIEGASAKDLCSASSVVSPSFVPTGEKPCEQVQFQPNTVNTLACPLLSNLATRLWLRNGAPVNASASCHVLPTGDLLLVGTQQLGEFQCWSLEEGFQQLVASYCPEVVEDGVANQTDEGGSVPVIISTSRVSAPAGGKASWGADRSYWKEFLVMCTLFVLAVLLPVLFLLYRHRNSMKVFLKQGECASVHPKTCPVVLPPETRPRFHRHRRRRGARRTAHLVHDPQARCLKRIQT

SEQ ID NO: 186 - DNA, 2433 bp, Homo sapiens
  CDS (1)...(2433)
atgctgcgcaccgcgatgggcctgaggagctggctcgccgccccatggggcgcgctgccgcctcggccaccgctgctgctgctcctgctgctgctgctcctgctgcagccgccgcctccgacctgggcgctcagcccccggatcagcctgcctctgggctctgaagagcggccattcctcagattcgaagctgaacacatctccaactacacagcccttctgctgagcagggatggcaggaccctgtacgtgggtgctcgagaggccctctttgcactcagtagcaacctcagcttcctgccaggcggggagtaccaggagctgctttggggtgcagacgcagagaagaaacagcagtgcagcttcaagggcaaggacccacagcgcgactgtcaaaactacatcaagatcctcctgccgctcagcggcagtcacctgttcacctgtggcacagcagccttcagccccatgtgtacctacatcaacatggagaacttcaccctggcaagggacgagaaggggaatgtcctcctggaagatggcaagggccgttgtcccttcgacccgaatttcaagtccactgccctggtggttgatggcgagctctacactggaacagtcagcagcttccaagggaatgacccggccatctcgcggagccaaagccttcgccccaccaagaccgagagctccctcaactggctgcaagacccagcttttgtggcctcagcctacattcctgagagcctgggcagcttgcaaggcgatgatgacaagatctactttttcttcagcgagactggccaggaatttgagttctttgagaacaccattgtgtcccgcattgcccgcatctgcaagggcgatgagggtggagagcgggtgctacagcagcgctggacctccttcctcaaggcccagctgctgtgctcacggcccgacgatggcttccccttcaacgtgctgcaggatgtcttcacgctgagccccagcccccaggactggcgtgacacccttttctatggggtcttcacttcccagtggcacaggggaactacagaaggctctgccgtctgtgtcttcacaatgaaggatgtgcagagagtcttcagcggcctctacaaggaggtgaaccgtgagacacagcagtggtacaccgtgacccacccggtgcccacaccccggcctggagcgtgcatcaccaacagtgcccgggaaaggaagatcaactcatccctgcagctcccagaccgcgtgctgaacttcctcaaggaccacttcctgatggacgggcaggtccgaagccgcatgctgctgctgcagccccaggctcgctaccagcgcgtggctgtacaccgcgtccctggcctgcaccacacctacgatgtcctcttcctgggcactggtgacggccggctccacaaggcagtgagcgtgggcccccgggtgcacatcattgaggagctgcagatcttctcatcgggacagcccgtgcagaatctgctcctggacacccacagggggctgctgtatgcggcctcacactcgggcgtagtccaggtgcccatggccaactgcagcctgtacaggagctgtggggactgcctcctcgcccgggacccctactgtgcttggagcggctccagctgcaagcacgtcagcctctaccagcctcagctggccaccaggccgtggatccaggacatcgagggagccagcgccaaggacctttgcagcgcgtcttcggttgtgtccccgtcttttgtaccaacaggggagaagccatgtgagcaagtccagttccagcccaacacagtgaacactttggcctgcccgctcctctccaacctggcgacccgactctggctacgcaacggggcccccgtcaatgcctcggcctcctgccacgtgctacccactggggacctgctgctggtgggcacccaacagctgggggagttccagtgctggtcactagaggagggcttccagcagctggtagccagctactgcccagaggtggtggaggacggggtggcagaccaaacagatgagggtggcagtgtacccgtcattatcagcacatcgcgtgtgagtgcaccagctggtggcaaggccagctggggtgcagacaggtcctactggaaggagttcctggtgatgtgcacgctctttgtgctggccgtgctgctcccagttttattcttgctctaccggcaccggaacagcatgaaagtcttcctgaagcagggggaatgtgccagcgtgcaccccaagacctgccctgtggtgctgccccctgagacccgcccactcaacggcctagggccccctagcaccccgctcgatcaccgagggtaccagtccccccgaaggaccgcgcacctggtgcatgacccgcaagcccggtgcctgaagcggatccagacatga

SEQ ID NO: 187 - protein, 810 aa, Homo sapiens
MLRTAMGLRSWLAAPWGALPPRPPLLLLLLLLLLLQPPPPTWALSPRISLPLGSEERPFLRFEAEHISNYTALLLSRDGRTLYVGAREALFALSSNLSFLPGGEYQELLWGADAEKKQQCSFKGKDPQRDCQNYIKILLPLSGSHLFTCGTAAFSPMCTYINMENFTLARDEKGNVLLEDGKGRCPFDPNFKSTALVVDGELYTGTVSSFQGNDPAISRSQSLRPTKTESSLNWLQDPAFVASAYIPESLGSLQGDDDKIYFFFSETGQEFEFFENTIVSRIARICKGDEGGERVLQQRWTSFLKAQLLCSRPDDGFPFNVLQDVFTLSPSPQDWRDTLFYGVFTSQWHRGTTEGSAVCVFTMKDVQRVFSGLYKEVNRETQQWYTVTHPVPTPRPGACITNSARERKINSSLQLPDRVLNFLKDHFLMDGQVRSRMLLLQPQARYQRVAVHRVPGLHHTYDVLFLGTGDGRLHKAVSVGPRVHIIEELQIFSSGQPVQNLLLDTHRGLLYAASHSGVVQVPMANCSLYRSCGDCLLARDPYCAWSGSSCKHVSLYQPQLATRPWIQDIEGASAKDLCSASSVVSPSFVPTGEKPCEQVQFQPNTVNTLACPLLSNLATRLWLRNGAPVNASASCHVLPTGDLLLVGTQQLGEFQCWSLEEGFQQLVASYCPEVVEDGVADQTDEGGSVPVIISTSRVSAPAGGKASWGADRSYWKEFLVMCTLFVLAVLLPVLFLLYRHRNSMKVFLKQGECASVHPKTCPVVLPPETRPLNGLGPPSTPLDHRGYQSPRRTAHLVHDPQARCLKRIQT

SEQ ID NO: 188 - DNA, 3318 bp, Homo sapiens
  CDS (1)...(3318)
atgctgcgcaccgcgatgggcctgaggagctggctcgccgccccatggggcgcgctgccgcctcggccaccgctgctgctgctcctgctgctgctgctcctgctgcagccgccgcctccgacctgggcgctcagcccccggatcagcctgcctctgggctctgaagagcggccattcctcagattcgaagctgaacacatctccaactacacagcccttctgctgagcagggatggcaggaccctgtacgtgggtgctcgagaggccctctttgcactcagtagcaacctcagcttcctgccaggcggggagtaccaggagctgctttggggtgcagacgcagagaagaaacagcagtgcagcttcaagggcaaggacccacagcgcgactgtcaaaactacatcaagatcctcctgccgctcagcggcagtcacctgttcacctgtggcacagcagccttcagccccatgtgtacctacatcaacatggagaacttcaccctggcaagggacgagaaggggaatgtcctcctggaagatggcaagggccgttgtcccttcgacccgaatttcaagtccactgccctggtggttgatggcgagctctacactggaacagtcagcagcttccaagggaatgacccggccatctcgcggagccaaagccttcgccccaccaagaccgagagctccctcaactggctgcaagacccagcttttgtggcctcagcctacattcctgagagcctgggcagcttgcaaggcgatgatgacaagatctactttttcttcagcgagactggccaggaatttgagttctttgagaacaccattgtgtcccgcattgcccgcatctgcaagggcgatgagggtggagagcgggtgctacagcagcgctggacctccttcctcaaggcccagctgctgtgctcacggcccgacgatggcttccccttcaacgtgctgcaggatgtcttcacgctgagccccagcccccaggactggcgtgacacccttttctatggggtcttcacttcccagtggcacaggggaactacagaaggctctgccgtctgtgtcttcacaatgaaggatgtgcagagagtcttcagcggcctctacaaggaggtgaaccgtgagacacagcagtggtacaccgtgacccacccggtgcccacaccccggcctggagcgtgcatcaccaacagtgcccgggaaaggaagatcaactcatccctgcagctcccagaccgcgtgctgaacttcctcaaggaccacttcctgatggacgggcaggtccgaagccgcatgctgctgctgcagccccaggctcgctaccagcgcgtggctgtacaccgcgtccctggcctgcaccacacctacgatgtcctcttcctgggcactggtgacggccggctccacaaggcagtgagcgtgggcccccgggtgcacatcattgaggagctgcagatcttctcatcgggacagcccgtgcagaatctgctcctggacacccacagggggctgctgtatgcggcctcacactcgggcgtagtccaggtgcccatggccaactgcagcctgtacaggagctgtggggactgcctcctcgcccgggacccctactgtgcttggagcggctccagctgcaagcacgtcagcctctaccagcctcagctggccaccaggccgtggatccaggacatcgagggagccagcgccaaggacctttgcagcgcgtcttcggttgtgtccccgtcttttgtaccaacaggggagaagccatgtgagcaagtccagttccagcccaacacagtgaacactttggcctgcccgctcctctccaacctggcgacccgactctggctacgcaacggggcccccgtcaatgcctcggcctcctgccacgtgctacccactggggacctgctgctggtgggcacccaacagctgggggagttccagtgctggtcactagaggagggcttccagcagctggtagccagctactgcccagaggtggtggaggacggggtggcagaccaaacagatacggtgcccacaccccggcctggagcgtgcatcaccaacagtgcccgggaaaggaagatcaactcatccctgcagctcccagaccgcgtgctgaacttcctcaaggaccacttcctgatggacgggcaggtccgaagccgcatgctgctgctgcagccccaggctcgctaccagcgcgtggctgtacaccgcgtccctggcctgcaccacacctacgatgtcctcttcctgggcactggtgacggccggctccacaaggcagtgagcgtgggcccccgggtgcacatcattgaggagctgcagatcttctcatcgggacagcccgtgcagaatctgctcctggacacccacagggggctgctgtatgcggcctcacactcgggcgtagtccaggtgcccatggccaactgcagcctgtacaggagctgtggggactgcctcctcgcccgggacccctactgtgcttggagcggctccagctgcaagcacgtcagcctctaccagcctcagctggccaccaggccgtggatccaggacatcgagggagccagcgccaaggacctttgcagcgcgtcttcggttgtgtccccgtcttttgtaccaacaggggagaagccatgtgagcaagtccagttccagcccaacacagtgaacactttggcctgcccgctcctctccaacctggcgacccgactctggctacgcaacggggcccccgtcaatgcctcggcctcctgccacgtgctacccactggggacctgctgctggtgggcacccaacagctgggggagttccagtgctggtcactagaggagggcttccagcagctggtagccagctactgcccagaggtggtggaggacggggtggcaaaccaaacagatgagggtggcagtgtacccgtcattatcagcacatcgcgtgtgagtgcaccagctggtggcaaggccagctggggtgcagacaggtcctactggaaggagttcctggtgatgtgcacgctctttgtgctggccgtgctgctcccagttttattcttgctctaccggcaccggaacagcatgaaagtcttcctgaagcagggggaatgtgccagcgtgcaccccaagacctgccctgtggtgctgccccctgagacccgcccactcaacggcctagggccccctagcaccccgctcgatcaccgagggtaccagtccccccgaaggaccgcgcacctggtgcatgacccgcaagcccggtgcctgaagcggatccagacatga

SEQ ID NO: 189 - protein, 1105 aa, Homo sapiens
MLRTAMGLRSWLAAPWGALPPRPPLLLLLLLLLLLQPPPPTWALSPRISLPLGSEERPFLRFEAEHISNYTALLLSRDGRTLYVGAREALFALSSNLSFLPGGEYQELLWGADAEKKQQCSFKGKDPQRDCQNYIKILLPLSGSHLFTCGTAAFSPMCTYINMENFTLARDEKGNVLLEDGKGRCPFDPNFKSTALVVDGELYTGTVSSFQGNDPAISRSQSLRPTKTESSLNWLQDPAFVASAYIPESLGSLQGDDDKIYFFFSETGQEFEFFENTIVSRIARICKGDEGGERVLQQRWTSFLKAQLLCSRPDDGFPFNVLQDVFTLSPSPQDWRDTLFYGVFTSQWHRGTTEGSAVCVFTMKDVQRVFSGLYKEVNRETQQWYTVTHPVPTPRPGACITNSARERKINSSLQLPDRVLNFLKDHFLMDGQVRSRMLLLQPQARYQRVAVHRVPGLHHTYDVLFLGTGDGRLHKAVSVGPRVHIIEELQIFSSGQPVQNLLLDTHRGLLYAASHSGVVQVPMANCSLYRSCGDCLLARDPYCAWSGSSCKHVSLYQPQLATRPWIQDIEGASAKDLCSASSVVSPSFVPTGEKPCEQVQFQPNTVNTLACPLLSNLATRLWLRNGAPVNASASCHVLPTGDLLLVGTQQLGEFQCWSLEEGFQQLVASYCPEVVEDGVADQTDTVPTPRPGACITNSARERKINSSLQLPDRVLNFLKDHFLMDGQVRSRMLLLQPQARYQRVAVHRVPGLHHTYDVLFLGTGDGRLHKAVSVGPRVHIIEELQIFSSGQPVQNLLLDTHRGLLYAASHSGVVQVPMANCSLYRSCGDCLLARDPYCAWSGSSCKHVSLYQPQLATRPWIQDIEGASAKDLCSASSVVSPSFVPTGEKPCEQVQFQPNTVNTLACPLLSNLATRLWLRNGAPVNASASCHVLPTGDLLLVGTQQLGEFQCWSLEEGFQQLVASYCPEVVEDGVANQTDEGGSVPVIISTSRVSAPAGGKASWGADRSYWKEFLVMCTLFVLAVLLPVLFLLYRHRNSMKVFLKQGECASVHPKTCPVVLPPETRPLNGLGPPSTPLDHRGYQSPRRTAHLVHDPQARCLKRIQT

SEQ ID NO: 190 - DNA, 3399 bp, Homo sapiens
  CDS (1)...(3399)
atgctgcgcaccgcgatgggcctgaggagctggctcgccgccccatggggcgcgctgccgcctcggccaccgctgctgctgctcctgctgctgctgctcctgctgcagccgccgcctccgacctgggcgctcagcccccggatcagcctgcctctgggctctgaagagcggccattcctcagattcgaagctgaacacatctccaactacacagcccttctgctgagcagggatggcaggaccctgtacgtgggtgctcgagaggccctctttgcactcagtagcaacctcagcttcctgccaggcggggagtaccaggagctgctttggggtgcagacgcagagaagaaacagcagtgcagcttcaagggcaaggacccacagcgcgactgtcaaaactacatcaagatcctcctgccgctcagcggcagtcacctgttcacctgtggcacagcagccttcagccccatgtgtacctacatcaacatggagaacttcaccctggcaagggacgagaaggggaatgtcctcctggaagatggcaagggccgttgtcccttcgacccgaatttcaagtccactgccctggtggttgatggcgagctctacactggaacagtcagcagcttccaagggaatgacccggccatctcgcggagccaaagccttcgccccaccaagaccgagagctccctcaactggctgcaagacccagcttttgtggcctcagcctacattcctgagagcctgggcagcttgcaaggcgatgatgacaagatctactttttcttcagcgagactggccaggaatttgagttctttgagaacaccattgtgtcccgcattgcccgcatctgcaagggcgatgagggtggagagcgggtgctacagcagcgctggacctccttcctcaaggcccagctgctgtgctcacggcccgacgatggcttccccttcaacgtgctgcaggatgtcttcacgctgagccccagcccccaggactggcgtgacacccttttctatggggtcttcacttcccagtggcacaggggaactacagaaggctctgccgtctgtgtcttcacaatgaaggatgtgcagagagtcttcagcggcctctacaaggaggtgaaccgtgagacacagcagtggtacaccgtgacccacccggtgcccacaccccggcctggagcgtgcatcaccaacagtgcccgggaaaggaagatcaactcatccctgcagctcccagaccgcgtgctgaacttcctcaaggaccacttcctgatggacgggcaggtccgaagccgcatgctgctgctgcagccccaggctcgctaccagcgcgtggctgtacaccgcgtccctggcctgcaccacacctacgatgtcctcttcctgggcactggtgacggccggctccacaaggcagtgagcgtgggcccccgggtgcacatcattgaggagctgcagatcttctcatcgggacagcccgtgcagaatctgctcctggacacccacagggggctgctgtatgcggcctcacactcgggcgtagtccaggtgcccatggccaactgcagcctgtacaggagctgtggggactgcctcctcgcccgggacccctactgtgcttggagcggctccagctgcaagcacgtcagcctctaccagcctcagctggccaccaggccgtggatccaggacatcgagggagccagcgccaaggacctttgcagcgcgtcttcggttgtgtccccgtcttttgtaccaacaggggagaagccatgtgagcaagtccagttccagcccaacacagtgaacactttggcctgcccgctcctctccaacctggcgacccgactctggctacgcaacggggcccccgtcaatgcctcggcctcctgccacgtgctacccactggggacctgctgctggtgggcacccaacagctgggggagttccagtgctggtcactagaggagggcttccagcagctggtagccagctactgcccagaggtggtggaggacggggtggcagaccaaacagatacggtgcccacaccccggcctggagcgtgcatcaccaacagtgcccgggaaaggaagatcaactcatccctgcagctcccagaccgcgtgctgaacttcctcaaggaccacttcctgatggacgggcaggtccgaagccgcatgctgctgctgcagccccaggctcgctaccagcgcgtggctgtacaccgcgtccctggcctgcaccacacctacgatgtcctcttcctgggcactggtgacggccggctccacaaggcagtgagcgtgggcccccgggtgcacatcattgaggagctgcagatcttctcatcgggacagcccgtgcagaatctgctcctggacacccacagggggctgctgtatgcggcctcacactcgggcgtagtccaggtgcccatggccaactgcagcctgtacaggagctgtggggactgcctcctcgcccgggacccctactgtgcttggagcggctccagctgcaagcacgtcagcctctaccagcctcagctggccaccaggccgtggatccaggacatcgagggagccagcgccaaggacctttgcagcgcgtcttcggttgtgtccccgtcttttgtaccaacaggggagaagccatgtgagcaagtccagttccagcccaacacagtgaacactttggcctgcccgctcctctccaacctggcgacccgactctggctacgcaacggggcccccgtcaatgcctcggcctcctgccacgtgctacccactggggacctgctgctggtgggcacccaacagctgggggagttccagtgctggtcactagaggagggcttccagcagctggtagccagctactgcccagaggtggtggaggacggggtggcaaaccaaacagatgagggtggcagtgtacccgtcattatcagcacatcgcgtgtgagtgcaccagctggtggcaaggccagctggggtgcagacaggtcctactggaaggagttcctggtgatgtgcacgctctttgtgctggccgtgctgctcccagttttattcttgctctaccggcaccggaacagcatgaaagtcttcctgaagcagggggaatgtgccagcgtgcaccccaagacctgccctgtggtgctgccccctgagacccgcccactcaacggcctagggccccctagcaccccgctcgatcaccgagggtaccagtccctgtcagacagccccccgggggcccgagtcttcactgagtcagagaagaggccactcagcatccaagacagcttcgtggaggtatccccagtgtgcccccggccccgggtccgccttggctcggagatccgtgactctgtggtgtga

SEQ ID NO: 191 - protein, 1132 aa, Homo sapiens
MLRTAMGLRSWLAAPWGALPPRPPLLLLLLLLLLLQPPPPTWALSPRISLPLGSEERPFLRFEAEHISNYTALLLSRDGRTLYVGAREALFALSSNLSFLPGGEYQELLWGADAEKKQQCSFKGKDPQRDCQNYIKILLPLSGSHLFTCGTAAFSPMCTYINMENFTLARDEKGNVLLEDGKGRCPFDPNFKSTALVVDGELYTGTVSSFQGNDPAISRSQSLRPTKTESSLNWLQDPAFVASAYIPESLGSLQGDDDKIYFFFSETGQEFEFFENTIVSRIARICKGDEGGERVLQQRWTSFLKAQLLCSRPDDGFPFNVLQDVFTLSPSPQDWRDTLFYGVFTSQWHRGTTEGSAVCVFTMKDVQRVFSGLYKEVNRETQQWYTVTHPVPTPRPGACITNSARERKINSSLQLPDRVLNFLKDHFLMDGQVRSRMLLLQPQARYQRVAVHRVPGLHHTYDVLFLGTGDGRLHKAVSVGPRVHIIEELQIFSSGQPVQNLLLDTHRGLLYAASHSGVVQVPMANCSLYRSCGDCLLARDPYCAWSGSSCKHVSLYQPQLATRPWIQDIEGASAKDLCSASSVVSPSFVPTGEKPCEQVQFQPNTVNTLACPLLSNLATRLWLRNGAPVNASASCHVLPTGDLLLVGTQQLGEFQCWSLEEGFQQLVASYCPEVVEDGVADQTDTVPTPRPGACITNSARERKINSSLQLPDRVLNFLKDHFLMDGQVRSRMLLLQPQARYQRVAVHRVPGLHHTYDVLFLGTGDGRLHKAVSVGPRVHIIEELQIFSSGQPVQNLLLDTHRGLLYAASHSGVVQVPMANCSLYRSCGDCLLARDPYCAWSGSSCKHVSLYQPQLATRPWIQDIEGASAKDLCSASSVVSPSFVPTGEKPCEQVQFQPNTVNTLACPLLSNLATRLWLRNGAPVNASASCHVLPTGDLLLVGTQQLGEFQCWSLEEGFQQLVASYCPEVVEDGVANQTDEGGSVPVIISTSRVSAPAGGKASWGADRSYWKEFLVMCTLFVLAVLLPVLFLLYRHRNSMKVFLKQGECASVHPKTCPVVLPPETRPLNGLGPPSTPLDHRGYQSLSDSPPGARVFTESEKRPLSIQDSFVEVSPVCPRPRVRLGSEIRDSVV

SEQ ID NO: 192 - DNA, 3366 bp, Homo sapiens
catagcaggcatggccttgctcactgagcattcactacatgccagtgttgcccgtggctttatatgtactctctccagccacccatgaagtgctgttcatagcactccgtcctagatgaagaagctgaggttcagagtgattgtgtggcttgctaaaagtccacaaaatatggaaggtagtgaattcttctgacagaagaacctgtgtgctcaaccactggattctaccacttccaggagcaagaaaaacaagaggccggtagcggggaaaatggtttggggaacggagatgaagccatttatttacatctgttgccagaccctgggtaaaagctgccagtgagttttgaaggcagtgtaagtgctgacccggggtggatgccctctgctgcagaaggcgctgccccaaggaagctcccagccctgaggacttggcagccattggctgatttgaaagaatacacagggtgtgccagctggtgtcgcttcctcttcaacatgtactgatgctgcagctgagctgctgcccagcccctggggagaagacatcagcagcatgcccagccagggcagggtggagagctgcagctgcaggtccggaggcgggggcccccggggcgactcgggggcggaccgcggggcggagctgccgcccgtgagtccggccgagccacctgagcccgagccgcgggacaccgtcgctcctgctctccgaatgctgcgcaccgcgatgggcctgaggagctggctcgccgccccatggggcgcgctgccgcctcggccaccgctgctgctgctcctgctgctgctgctcctgctgcagccgccgcctccgacctgggcgctcagcccccggatcagcctgcctctgggctctgaagagcggccattcctcagattcgaagctgaacacatctccaactacacagcccttctgctgagcagggatggcaggaccctgtacgtgggtgctcgagaggccctctttgcactcagtagcaacctcagcttcctgccaggcggggagtaccaggagctgctttggggtgcagacgcagagaagaaacagcagtgcagcttcaagggcaaggacccacagcgcgactgtcaaaactacatcaagatcctcctgccgctcagcggcagtcacctgttcacctgtggcacagcagccttcagccccatgtgtacctacatcaacatggagaacttcaccctggcaagggacgagaaggggaatgtcctcctggaagatggcaagggccgttgtcccttcgacccgaatttcaagtccactgccctggtggttgatggcgagctctacactggaacagtcagcagcttccaagggaatgacccggccatctcgcggagccaaagccttcgccccaccaagaccgagagctccctcaactggctgcaagacccagcttttgtggcctcagcctacattcctgagagcctgggcagcttgcaaggcgatgatgacaagatctactttttcttcagcgagactggccaggaatttgagttctttgagaacaccattgtgtcccgcattgcccgcatctgcaagggcgatgagggtggagagcgggtgctacagcagcgctggacctccttcctcaaggcccagctgctgtgctcacggcccgacgatggcttccccttcaacgtgctgcaggatgtcttcacgctgagccccagcccccaggactggcgtgacacccttttctatggggtcttcacttcccagtggcacaggggaactacagaaggctctgccgtctgtgtcttcacaatgaaggatgtgcagagagtcttcagcggcctctacaaggaggtgaaccgtgagacacagcagtggtacaccgtgacccacccggtgcccacaccccggcctggagcgtgcatcaccaacagtgcccgggaaaggaagatcaactcatccctgcagctcccagaccgcgtgctgaacttcctcaaggaccacttcctgatggacgggcaggtccgaagccgcatgctgctgctgcagccccaggctcgctaccagcgcgtggctgtacaccgcgtccctggcctgcaccacacctacgatgtcctcttcctgggcactggtgacggccggctccacaaggcagtgagcgtgggcccccgggtgcacatcattgaggagctgcagatcttctcatcgggacagcccgtgcagaatctgctcctggacacccacagggggctgctgtatgcggcctcacactcgggcgtagtccaggtgcccatggccaactgcagcctgtacaggagctgtggggactgcctcctcgcccgggacccctactgtgcttggagcggctccagctgcaagcacgtcagcctctaccagcctcagctggccaccaggccgtggatccaggacatcgagggagccagcgccaaggacctttgcagcgcgtcttcggttgtgtccccgtcttttgtaccaacaggggagaagccatgtgagcaagtccagttccagcccaacacagtgaacactttggcctgcccgctcctctccaacctggcgacccgactctggctacgcaacggggcccccgtcaatgcctcggcctcctgccacgtgctacccactggggacctgctgctggtgggcacccaacagctgggggagttccagtgctggtcactagaggagggcttccagcagctggtagccagctactgcccagaggtggtggaggacggggtggcagaccaaacagatgagggtggcagtgtacccgtcattatcagcacatcgcgtgtgagtgcaccagctggtggcaaggccagctggggtgcagacaggtcctactggaaggagttcctggtgatgtgcacgctctttgtgctggccgtgctgctcccagttttattcttgctctaccggcaccggaacagcatgaaagtcttcctgaagcagggggaatgtgccagcgtgcaccccaagacctgccctgtggtgctgccccctgagacccgcccactcaacggcctagggccccctagcaccccgctcgatcaccgagggtaccagtccctgtcagacagccccccgggggcccgagtcttcactgagtcagagaagaggccactcagcatccaagacagcttcgtggaggtatccccagtgtgcccccggccccgggtccgccttggctcggagatccgtgactctgtggtgtgagagctgacttccagaggacgctgccctggcttcaggggctgtgaatgctcggagagggtcaactggacctcccctccgctctgctcttcgtggaacacgaccgtggtgccgcagcaacagatggaaggcctcctggc

SEQ ID NO: 193 - DNA, 13770 bp, Homo sapiens
  CDS (1)...(13770)
atggatataattatgggacactgtgtgggcacacggcctcctgcttgttgcctcatcctcctgcttttcaagcttttggccactgtctcccaggggctgccagggactggacccctgggcttccacttcacacattccatttataatgctaccgtgtatgagaactcagcagcaaggacctacgtcaacagccagagtagaatgggcatcaccttaatagatctatcctgggatatcaaatacagaatagtgtccggagacgaggaaggctttttcaaagcagaggaagtcatcattgcagatttctgttttctcagaataagaactaaaggtggcaattctgccatattaaatagggaaatccaggataattatttattgatagtaaaaggttctgtcagaggagaggatttggaagcatggaccaaagtgaatatacaggttttagatatgaatgatctgagacctttgttttcacccacaacatactctgttaccatagcagaaagcacacctctaaggactagtgttgcccaggtgactgcaacagacgcagatattggttccaatggagaattctactactactttaaaaataaagttgatctcttttcagttcaccccacgagtggtgtcatctccttaagtggtcgattaaattatgatgaaaagaataggtatgatctggaaattttggctgtggaccggggaatgaaactgtatgggaacaatggagtgagcagtactgcaaagctttatgttcacattgagcgcataaatgaacatgccccaacaatccatgtagtcactcatgttcctttctcgttggaaaaagagccaacatatgcagtggtgacagttgatgacttagatgatggagcgaatggagagatcgaatctgtttccattgtggctggggatcctttagatcagttcttcctggctaaggaaggaaagtggttgaatgagtacaagattaaggagaggaagcagattgactgggagagctttccctatggctacaatctcactcttcaagcaaaagacaagggatctcctcaaaaatgttcagcattaaaggcagtctacattggcaaccccacaagagacactgtccccattagatttgaaaaagaagtgtacgatgtgagcataagtgaattttcccctcctggtgtcgtggttgctatagtaaaattaagtcctgaaccgatagatgtggaatacaaattatctcctggtgaggatgcagtgtactttaaaattaatcctcggtcgggtctgattgttacagcacggccactgaatactgttaagaaggaggtttataaactggaggtgacaaacaaggaaggagatttaaaagcacaggtcaccatcagcatagaagatgcaaatgaccacaccccagaatttcagcaaccactgtatgatgcttatgtgaatgaaagtgtcccagtgggaaccagcgttctaacagtttcagcttctgataaggataaaggagaaaatgggtacatcacctatagtatcgctagcctgaatttgttaccatttgtcattaatcagtttacaggtgttattagcacaactgaagaactggattttgaatcctccccagaaatttacagattcattgttagagcctctgactggggttcaccataccgccatgaaagtgaggtcaatgtgactattcgaataggaaatgtcaacgacaacagccctctctttgaaaaagtggcttgccagggagttatttcatatgactttccagttggtggtcacatcacagcagtctcagcgatcgatatcgatgaacttgaacttgtaaagtacaaaatcatttctggaaatgaacttggcttcttttatttaaacccagattctggtgttttacagcttaaaaaatcactgacaaattctggcattaaaaatggcaattttgccctcagaattacagcaactgatggagagaatcttgcagaccccatgtctattaacatttcagtcctacatgggaaagtgtcttcaaagagcttcagttgcagagaaactcgtgtggctcaaaagctggcagagaaactactcattaaggcaaaagcaaatgggaaactgaatctggaagatggatttcttgacttttattcaattaatagacagggaccatattttgacaagtcttttccttctgatgtggctgtaaaggaggatctgccagttggtgctaacattctgaagattaaagcctatgatgccgactctggcttcaatggaaaagtgctatttacaatatcagatggaaatacggatagttgctttaatattgatatggagactgggcagcttaaagtccttatgcccatggatcgagaacacacagacctctatctccttaatatcaccatctatgacttaggtaatccacagaaatcgtcatggagactgctgaccatcaatgtggaggatgctaatgacaatagcccagtttttattcaagacagttactcagttaacattcttgaaagttcaggcattggtactgaaatcattcaagtggaagccagagacaaagacttaggttctaatggtgaagtgacttactcagtcttgacagatacacagcagtttgccatcaatagctcaactggaatcgtttatgtagccgaccagttggaccgggaatccaaagccaattattctttgaaaatagaagccagggacaaggcagagagtggtcagcagctgttttcagttgtcactcttaaagtttttttagatgatgtcaatgactgctccccagctttcattcccagtagctatagtgtgaaggttcttgaagatctccctgttggcactgtcattgcttggcttgagacccatgatccagatcttggactggggggtcaagtgcgctattctttggtcaatgactataatgggagatttgaaatagataaagcaagtggtgccatccgcttgagcaaagagcttgattatgagaaacagcagttctataaccttactgtgcgggccaaagacaaagggcggcctgtctctctgtcatctgtttcctttgttgaggtggaagtggtggatgtcaatgaaaacctccacactccctatttcccagactttgctgttgttggatctgtaaaggaaaactcacgcattggaacaagcgtgctgcaggtgactgctcgagatgaagactccggaagggatggagagatccagtactccatcagggatggcagtggtcttggaaggttcagtatagacgacgagagtggggtcatcactgccgcagacattcttgatcgggagacaatggggtcatactggctaacagtgtatgccacagacaggggcgttgttccactctactccaccattgaggtctacattgaagttgaagatgtgaatgacaatgccccgctgacctcagaacctatatattatcctgttgtcatggaaaactctccaaaggacgtatctgtcattcagatccaggctgaagatcctgactccagttccaatgaaaaactgacatacaggattacaagtggaaatcctcagaatttttttgccatcaatatcaaaacaggtctgattacaacaacttcaaggaaattggatcgagaacagcaggcagaacattttctggaggtgactgtgacagatggtggtccctctccaaaacagtcaaccatttgggtggtggttcaggttctagatgaaaatgacaacaagccccagttcccagagaaggtctaccagatcaagctgccagaacgtgaccgaaagaagagaggagaaccgatttacagggcttttgcatttgatagagatgagggccccaacgcagaaatctcctacagtattgtggatgggaatgatgacggaaagttctttattgaccctaaaactgggatggtttcttctagaaagcagtttacagcaggcagttatgacatcctaacgataaaggcagtggacaatgggcgcccacagaaatcctccacggcccgcctccacattgaatggattaagaaaccacccccttcacctataccattgaccttcgatgagccgttttataacttcacagtcatggaaagtgatagagtgactgaaattgtaggggtggtgtctgtgcagccagctaacacccctctgtggtttgacatagttggggggaattttgacagcgcttttgatgcagagaagggtgttgggacaattgtcatcgcaaaacctttggatgcagagcagaggtccatctataatatgagtgtggaagtcaccgatgggacaaatgttgctgttactcaggtatttatcaaagtgctggataataatgataatggcccagaattctctcagccgaattacgatgtgacaatttccgaggatgtgcttccagacacggagatcctgcagattgaagccacagatagagatgagaagcacaagctgagctacactgttcatagcagcatcgactccatcagcatgagaaaattccggattgaccctagcactggcgtgctctatactgccgagaggctggaccatgaggcccaggacaagcacattctcaacataatggtcagagatcaggagtttccttatcgaagaaacttggcccgagtcattgtgaatgtggaggatgctaatgatcacagtccttattttaccaacccactgtatgaagcgtctgtgtttgaatctgctgctctgggatcagctgttctgcaagtgacggctctggacaaagacaaaggagaaaatgcagaactcatatataccatagaagcagggaacactgggaacatgtttaagatcgaaccggtcctaggcatcatcaccatttgcaaagaaccagacatgacgacgatgggtcagtttgtcctatccatcaaagtcacagatcagggatccccgccaatgtctgctactgcaattgtgcgcatttccgtcaccatgtctgacaattctcaccccaagttcattcacaaagactaccaagcagaagtaaatgaaaatgttgacattggaacatcagtcattctaatctctgccatcagtcaatctaccctcatttatgaagtcaaagatggagacattaatgggatctttaccataaatccatattctggagtcatcaccactcagaaggccctggattatgagcgcacatcctcttatcaactcatcattcaggccaccaatatggcaggaatggcttccaatgctacagtcaatattcagattgttgatgaaaatgataatgccccagtttttctcttttctcaatactcaggcagcctaagtgaggctgccccaattaatagcattgtcaggagcttggataacagcccactggtgattcgagccacagatgctgacagcaaccggaatgctctgcttgtgtatcagattgtggagtcaacagcaaaaaagtttttcacggtggactccagtacaggtgcaatcagaacaattgccaacctggaccatgaaaccattgcccatttccattttcatgtgcatgtgagagacagtggtagcccccaactgactgcagagagtcccgttgaagtcaacattgaggtgacagatgtgaatgataacccacctgtttttactcaggctgtgtttgagactatcttacttctacctacctatgttggagtggaggttctgaaagttagtgccacagatcctgactctgaggtaccccctgaactgacatacagcctaatggaaggcagtttggatcattttttaattgactcaaacagtggagtacttaccataaaaaacaacaacctctccaaggatcactacatgctgatagttaaggtgtctgatggaaagttctacagtacctccatggtcaccatcatggttaaagaagccatggacagcggcctccactttacacaaagcttctattccacctcaatctcagagaacaacactaacataaccaaagttgctattgtcaatgcagttggaaatcgccttaatgagcccttaaaatacagcatcttaaacccaggaaataagttcaagataaaatctacctcaggggtcattcagacgactggagtcccctttgaccgtgaagaacaagagttatatgagctggtggtagaagccagccgtgagctggaccatctgcgtgtggccagagtggtggtcagggttaacattgaagacataaatgacaattctccagtctttgtgggcctcccatactatgctgctgttcaagtggatgcggaacccgggactctgatttatcaggtgacagccattgacaaagataaaggtccaaatggagaagtgacctatgtcctgcaggatgactatggccactttgaaattaaccctaattcagggaatgttattttaaaggaagcattcaactctgacttgtccaacattgagtatggagtcaccatcctagccaaggatggcggaaaaccttctttgtctacatctgtggagcttcccatcactattgtcaacaaagcaatgcctgtgtttgataagcccttttatacagcatctgtcaatgaagacatcagaatgaacacacccatcctaagcatcaatgccaccagtccagaaggccaaggcatcatatatatcattatcgatggggacccttttaaacagtttaacattgactttgacactggggtcctgaaagttgttagccctttggattatgaagttacatctgcttacaagctgacaataagagccagcgacgcccttactggtgctagggctgaagtcactgttgacttgctagttaatgatgtaaatgacaacccccctattttcgatcagcctacatacaatacaacactatcagaagcatctcttattgggacacctgttttacaagttgtctctattgatgcagactcagaaaacaataaaatggtacattatcagattgtccaggatacctacaatagcacagattattttcacatagatagctcaagtggcttaatcctgacagcacgaatgctggaccatgagttagtacaacactgcactttgaaagtcagatcaatagatagtggcttcccatcactgagcagtgaggttctcgttcatatctacatctctgatgtaaatgacaaccctccagtttttaatcagctcatttatgagtcatatgtgagtgaattagccccccggggccattttgtaacctgtgtacaagcctctgatgcagacagctctgattttgaccggttggaatatagcattttatctgggaatgaccggacgagctttctgatggacagcaagagtggagttatcacattgtccaaccatcggaagcagcggatggagcctctgtacagtctcaatgtgtctgtctctgatgggttgttcaccagcactgcacaggtgcatattagggtacttggggctaacttgtacagccctgccttttcacaaagcacatacgtagctgaggtgagagagaacgtggctgcaggaacaaaggtaattcatgttcgagccacagatggtgatccagggacttatgggcagatcagctatgccatcatcaatgactttgccaaggatcgattcctcatagacagcaatgggcaggtcatcaccacagaaaggctagaccgggaaaaccctctagaaggggatgttagtatttttgtgagggcccttgatggtggagggagaacaactttctgcactgtgagagtgattgttgtggatgaaaatgacaatgctccccagttcatgacagtggaatatagagccagtgtcagggcagatgttggaaggggccacttggtcactcaagttcaagccatagatcccgatgatggagcaaattcaaggattacttattccctctatagcgaggcctctgtttcagtggccgacctcctggaaatcgatcctgacaatggctggatggtcacaaagggtaattttaaccagctgaaaaatacagtgctttcgttctttgtcaaagcagtagatgggggcatcccagtaaagcactccctcattcctgtctatatccacgtcttgccccctgaaacgttcttgccatcattcacccagtctcagtattcctttaccattgcagaagatacagccattgggagtacagtggacaccctgaggattttgcccagtcagaatgtctggttcagcacagttaatggggaacggccagaaaataacaaagggggcgtattcgtcatagaacaggaaacaggcactattaagcttgacaaacgccttgaccgtgaaaccagcccagctttccactttaaagtagcagccactatacccctggacaaagtagacattgtgtttactgtggatgtagatatcaaggtattggatttgaatgacaacaagccagtctttgaaacttcaagctatgacaccattataatggaagggatgcctgttggcaccaaactcacacaagtgagagctattgatatggactggggagccaatggacaagtcacttactccctccactcggattcccagcccgaaaaggtaatggaagcattcaatattgacagcaacacgggctggatcagtaccttgaaggacctagatcacgagacagaccccacattcaccttctctgtggtggcctctgaccttggagaggcattctctctttcctccacggccttggtctctgtcagagtgacagatataaatgacaatgcaccagtcttcgcgcaggaagtgtaccgagggaatgtgaaggagagcgacccaccgggcgaggtggtagccgtcctcagcacctgggacagagacacatccgacgttaatcgccaagtgagctaccatattacaggaggaaaccctcgaggaaggtttgctctgggcctggtgcaaagtgagtggaaggtctatgtgaagaggcctctagacagagaagaacaggacatttactttctcaatatcactgccactgatgggctttttgtcacacaggccatggtggaagtgagcgtcagtgatgtgaatgacaatagcccagtgtgtgatcaggttgcatatacagcattacttcctgaagacattccatcaaataaaatcatcctgaaagtcagtgcaaaggatgctgatattggatccaatggatatatacgatactcactctatggatctggaaacagtgaattttttctagatccagaaagtggcgagttaaaaaccttggctctgttggaccgggagaggatccccgtgtacagcctgatggccaaggccactgacgggggtggcaggttctgccagtccaacatccacctaatcctggaggatgtgaatgataacccccctgtgttttcttctgaccactacaacacctgtgtctatgagaacacagccaccaaggctctgttgaccagagttcaagccgtggaccccgacattggcatcaataggaaggtcgtgtactccctggcagactcagctggtggggtcttctccattgacagctcatctggcatcatcatcctggagcagccactggaccgtgagcagcagtcttcgtacaacatcagcgtgcgggccactgaccagagtcctggacagtccctgtcctctctcactactgtcaccatcaccgttctggacattaatgacaacccccctgtgtttgagaggagggactacctggtgacggtgcctgaggacacctcccctggcacccaagtccttgctgtttttgccaccagcaaagatattggcacaaatgctgagatcacttatctcatccggtctgggaacgaacaagggaaatttaagatcaaccccaagacagggggtatttctgtctctgaagtcctggactatgaattatgcaaaaggttttacctggtagtggaagccaaagatgggggcaccccagctctcagcgctgtggccactgtcaacatcaacctcacagatgttaatgacaaccctcccaagttcagccaagacgtctacagtgcggttatcagtgaagacgccttggtgggagactctgtcattttgctaatagcagaagatgtagacagccagcccaacggacagattcatttttccattgtgaatggagatcgggacaatgaatttactgtagatcctgtcttgggacttgtgaaagttaagaagaaattggaccgggaacgggtgtctggatactctctgcttgtccaggccgtagacagtggcattcctgcaatgtcatcaactgcaactgtcaacattgatatttctgatgtgaatgacaacagcccggtgtttacacctgccaactatactgctgtgattcaggaaaataagccagtgggcaccagcatcttgcagctggtggtgacagacagagactcctttcacaatgggcctcccttttcattctctattttgtcgggaaatgaagaggaggagtttgtgttggaccctcatgggatcttgcggtcggctgtggtcttccagcacacagagtctctggaatacgtgttgtgtgtccaggcaaaggattcaggcaaaccccagcaagtttctcacacttacatccgcgtgcgagtcattgaggaaagcacccacaagcccacagccattcccctggaaattttcattgtcaccatggaggatgactttcctggtggggtcattgggaagattcatgccacagatcaagacatgtatgatgtgctcacatttgccctgaaatcggagcagaaaagcttatttaaagtgaacagtcacgatgggaaaatcatcgccctgggaggcctggacagcggcaagtatgtcctgaatgtgtctgtgagtgatggtcgcttccaggtacccattgatgtggtcgtgcatgtggagcagttggtgcatgagatgctgcagaacactgtcaccatccgctttgaaaatgtgtcccctgaggacttcgtggggctgcacatgcatgggttccggcgcaccctgcggaatgcagtcctcacccagaagcaggacagcctgcgcatcatcagcatccagcccgtggcaggcaccaaccaactggacatgctgtttgcggtggagatgcacagcagcgagttctacaagccagcctacctgatccagaagctgtccaatgctagaagacacctggagaatatcatgcgcatctcagccatcttggagaagaactgctcagggctggactgtcaggaacagcattgtgagcaaggcttgtcactcgattcccacgcgctcatgacctacagcacggctcgcatcagctttgtgtgtccgcgtttctacaggaacgtgcgttgcacctgcaatggaggactgtgtccggggtccaacgatccttgtgtggagaagccgtgtccaggggacatgcagtgtgtcggttatgaagccagcaggagaccgttcctctgccagtgtccaccagggaagctcggagagtgctcagggcacacttctctcagctttgctggaaacagttacatcaaatatcggctttctgaaaatagcaaagaagaggatttcaaactagctctgcgtcttcgaacactgcaaagcaatgggattataatgtacaccagagcaaatccctgcataattctgaagattgtggatggcaagctgtggttccagctggactgcggcagcggccctggaatcttgggcatctcgggccgtgctgtcaacgacgggagctggcactcggtcttcctggagctcaaccgcaatttcacgagcctgtccctggatgacagctacgtggagcggcgccgggcgcccctctacttccagacgctgagcactgagagtagcatctacttcggcgccctggtgcaagcggataacatccgcagcctgactgacacgcgggtcacgcaggtgctcagcggcttccagggctgcctggactcggtgatactgaataacaatgagctgccgctgcagaacaagcgcagcagcttcgcggaggtggtgggcctgacggagctgaagctgggctgcgtgctctatcccgacgcctgcaagcgcagcccgtgccagcacgggggcagctgcactggcctgccatcggggggctatcagtgtacctgtctctcacagtttacggggagaaactgtgaatctgagattacagcctgcttcccaaacccctgccggaatggaggatcctgcgatccaataggaaacactttcatctgcaattgtaaagctgggctcactggagtcacgtgtgaggaggacatcaatgagtgcgaacgagaggagtgtgagaacggaggctcctgcgtgaacgtgttcggctccttcctctgcaactgcacgccgggctacgtgggccagtactgcgggctgcgccccgtggtggtacccaatatccaggctggccactcctacgtggggaaggaggagctcatcggcatcgccgtggtcctcttcgtcatcttcatcctggtggttctcttcatagtcttccgcaagaaggtcttccgcaagaactactcccgcaacaacatcacgctagtgcaggacccggccaccgccgccctgcttaacaagagcaatggcatcccgttccggaacctgcgcggcagtggggacggccgcaacgtctaccaggaggtggggcccccgcaggtccccgtgcgccccatggcctacacaccctgcttccagagtgactccaggagcaacctggataagatcgtggacgggctgggaggcgagcaccaggaaatgaccacgtttcaccctgagtcgccccgcatcctgacagcccggcggggcgtggtcgtgtgcagtgtggcccccaacctccccgccgtgtcaccctgccgctccgactgcgactccatccggaagaatggctgggacgcgggaactgagaacaaaggggttgatgacccgggagaagtgacctgctttgcaggtagtaataaaggcagcaactctgaagttcagtccctcagctccttccagtcagattctggtgacgacaatgcctccatagtgactgtcattcagcttgtcaacaatgtagttgacactatagagaatgaagtgtctgtcatggaccaaggacagaactacaaccgagcctatcactgggacacctctgattggatgccaggggcccgcctgtcggacatagaggaagtgcccaactatgagaaccaggatggagggtctgcacaccaggggagcacacgggagctggagagcgattactacctgggtggttatgacattgacagtgaatacccaccccctcatgaagaggagttcttgagtcaggaccagctgcctcctcctctcccggaggacttcccagaccaatatgaggccctgccaccctcccagcctgtctccctggccagcacactgagcccagactgcaggagaaggccccagtttcatcctagccagtatctccctcctcacccattccccaacgaaacggatttggtgggcccgcctgccagctgtgaatttagtacttttgctgtgagcatgaaccagggcacagagcccacaggcccagcagacagcgtgtctctgtccttgcacaattccagaggcacctcatcctcggatgtgtctgccaactgcggctttgacgattccgaagtagccatgagtgactacgagagcgtgggagagctcagcctcgccagccttcacattccctttgtggagactcagcatcagactcaagtgtag

SEQ ID NO: 194 - protein, 4589 aa, Homo sapiens
MDIIMGHCVGTRPPACCLILLLFKLLATVSQGLPGTGPLGFHFTHSIYNATVYENSAARTYVNSQSRMGITLIDLSWDIKYRIVSGDEEGFFKAEEVIIADFCFLRIRTKGGNSAILNREIQDNYLLIVKGSVRGEDLEAWTKVNIQVLDMNDLRPLFSPTTYSVTIAESTPLRTSVAQVTATDADIGSNGEFYYYFKNKVDLFSVHPTSGVISLSGRLNYDEKNRYDLEILAVDRGMKLYGNNGVSSTAKLYVHIERINEHAPTIHVVTHVPFSLEKEPTYAVVTVDDLDDGANGEIESVSIVAGDPLDQFFLAKEGKWLNEYKIKERKQIDWESFPYGYNLTLQAKDKGSPQKCSALKAVYIGNPTRDTVPIRFEKEVYDVSISEFSPPGVVVAIVKLSPEPIDVEYKLSPGEDAVYFKINPRSGLIVTARPLNTVKKEVYKLEVTNKEGDLKAQVTISIEDANDHTPEFQQPLYDAYVNESVPVGTSVLTVSASDKDKGENGYITYSIASLNLLPFVINQFTGVISTTEELDFESSPEIYRFIVRASDWGSPYRHESEVNVTIRIGNVNDNSPLFEKVACQGVISYDFPVGGHITAVSAIDIDELELVKYKIISGNELGFFYLNPDSGVLQLKKSLTNSGIKNGNFALRITATDGENLADPMSINISVLHGKVSSKSFSCRETRVAQKLAEKLLIKAKANGKLNLEDGFLDFYSINRQGPYFDKSFPSDVAVKEDLPVGANILKIKAYDADSGFNGKVLFTISDGNTDSCFNIDMETGQLKVLMPMDREHTDLYLLNITIYDLGNPQKSSWRLLTINVEDANDNSPVFIQDSYSVNILESSGIGTEIIQVEARDKDLGSNGEVTYSVLTDTQQFAINSSTGIVYVADQLDRESKANYSLKIEARDKAESGQQLFSVVTLKVFLDDVNDCSPAFIPSSYSVKVLEDLPVGTVIAWLETHDPDLGLGGQVRYSLVNDYNGRFEIDKASGAIRLSKELDYEKQQFYNLTVRAKDKGRPVSLSSVSFVEVEVVDVNENLHTPYFPDFAVVGSVKENSRIGTSVLQVTARDEDSGRDGEIQYSIRDGSGLGRFSIDDESGVITAADILDRETMGSYWLTVYATDRGVVPLYSTIEVYIEVEDVNDNAPLTSEPIYYPVVMENSPKDVSVIQIQAEDPDSSSNEKLTYRITSGNPQNFFAINIKTGLITTTSRKLDREQQAEHFLEVTVTDGGPSPKQSTIWVVVQVLDENDNKPQFPEKVYQIKLPERDRKKRGEPIYRAFAFDRDEGPNAEISYSIVDGNDDGKFFIDPKTGMVSSRKQFTAGSYDILTIKAVDNGRPQKSSTARLHIEWIKKPPPSPIPLTFDEPFYNFTVMESDRVTEIVGVVSVQPANTPLWFDIVGGNFDSAFDAEKGVGTIVIAKPLDAEQRSIYNMSVEVTDGTNVAVTQVFIKVLDNNDNGPEFSQPNYDVTISEDVLPDTEILQIEATDRDEKHKLSYTVHSSIDSISMRKFRIDPSTGVLYTAERLDHEAQDKHILNIMVRDQEFPYRRNLARVIVNVEDANDHSPYFTNPLYEASVFESAALGSAVLQVTALDKDKGENAELIYTIEAGNTGNMFKIEPVLGIITICKEPDMTTMGQFVLSIKVTDQGSPPMSATAIVRISVTMSDNSHPKFIHKDYQAEVNENVDIGTSVILISAISQSTLIYEVKDGDINGIFTINPYSGVITTQKALDYERTSSYQLIIQATNMAGMASNATVNIQIVDENDNAPVFLFSQYSGSLSEAAPINSIVRSLDNSPLVIRATDADSNRNALLVYQIVESTAKKFFTVDSSTGAIRTIANLDHETIAHFHFHVHVRDSGSPQLTAESPVEVNIEVTDVNDNPPVFTQAVFETILLLPTYVGVEVLKVSATDPDSEVPPELTYSLMEGSLDHFLIDSNSGVLTIKNNNLSKDHYMLIVKVSDGKFYSTSMVTIMVKEAMDSGLHFTQSFYSTSISENNTNITKVAIVNAVGNRLNEPLKYSILNPGNKFKIKSTSGVIQTTGVPFDREEQELYELVVEASRELDHLRVARVVVRVNIEDINDNSPVFVGLPYYAAVQVDAEPGTLIYQVTAIDKDKGPNGEVTYVLQDDYGHFEINPNSGNVILKEAFNSDLSNIEYGVTILAKDGGKPSLSTSVELPITIVNKAMPVFDKPFYTASVNEDIRMNTPILSINATSPEGQGIIYIIIDGDPFKQFNIDFDTGVLKVVSPLDYEVTSAYKLTIRASDALTGARAEVTVDLLVNDVNDNPPIFDQPTYNTTLSEASLIGTPVLQVVSIDADSENNKMVHYQIVQDTYNSTDYFHIDSSSGLILTARMLDHELVQHCTLKVRSIDSGFPSLSSEVLVHIYISDVNDNPPVFNQLIYESYVSELAPRGHFVTCVQASDADSSDFDRLEYSILSGNDRTSFLMDSKSGVITLSNHRKQRMEPLYSLNVSVSDGLFTSTAQVHIRVLGANLYSPAFSQSTYVAEVRENVAAGTKVIHVRATDGDPGTYGQISYAIINDFAKDRFLIDSNGQVITTERLDRENPLEGDVSIFVRALDGGGRTTFCTVRVIVVDENDNAPQFMTVEYRASVRADVGRGHLVTQVQAIDPDDGANSRITYSLYSEASVSVADLLEIDPDNGWMVTKGNFNQLKNTVLSFFVKAVDGGIPVKHSLIPVYIHVLPPETFLPSFTQSQYSFTIAEDTAIGSTVDTLRILPSQNVWFSTVNGERPENNKGGVFVIEQETGTIKLDKRLDRETSPAFHFKVAATIPLDKVDIVFTVDVDIKVLDLNDNKPVFETSSYDTIIMEGMPVGTKLTQVRAIDMDWGANGQVTYSLHSDSQPEKVMEAFNIDSNTGWISTLKDLDHETDPTFTFSVVASDLGEAFSLSSTALVSVRVTDINDNAPVFAQEVYRGNVKESDPPGEVVAVLSTWDRDTSDVNRQVSYHITGGNPRGRFALGLVQSEWKVYVKRPLDREEQDIYFLNITATDGLFVTQAMVEVSVSDVNDNSPVCDQVAYTALLPEDIPSNKIILKVSAKDADIGSNGYIRYSLYGSGNSEFFLDPESGELKTLALLDRERIPVYSLMAKATDGGGRFCQSNIHLILEDVNDNPPVFSSDHYNTCVYENTATKALLTRVQAVDPDIGINRKVVYSLADSAGGVFSIDSSSGIIILEQPLDREQQSSYNISVRATDQSPGQSLSSLTTVTITVLDINDNPPVFERRDYLVTVPEDTSPGTQVLAVFATSKDIGTNAEITYLIRSGNEQGKFKINPKTGGISVSEVLDYELCKRFYLVVEAKDGGTPALSAVATVNINLTDVNDNPPKFSQDVYSAVISEDALVGDSVILLIAEDVDSQPNGQIHFSIVNGDRDNEFTVDPVLGLVKVKKKLDRERVSGYSLLVQAVDSGIPAMSSTATVNIDISDVNDNSPVFTPANYTAVIQENKPVGTSILQLVVTDRDSFHNGPPFSFSILSGNEEEEFVLDPHGILRSAVVFQHTESLEYVLCVQAKDSGKPQQVSHTYIRVRVIEESTHKPTAIPLEIFIVTMEDDFPGGVIGKIHATDQDMYDVLTFALKSEQKSLFKVNSHDGKIIALGGLDSGKYVLNVSVSDGRFQVPIDVVVHVEQLVHEMLQNTVTIRFENVSPEDFVGLHMHGFRRTLRNAVLTQKQDSLRIISIQPVAGTNQLDMLFAVEMHSSEFYKPAYLIQKLSNARRHLENIMRISAILEKNCSGLDCQEQHCEQGLSLDSHALMTYSTARISFVCPRFYRNVRCTCNGGLCPGSNDPCVEKPCPGDMQCVGYEASRRPFLCQCPPGKLGECSGHTSLSFAGNSYIKYRLSENSKEEDFKLALRLRTLQSNGIIMYTRANPCIILKIVDGKLWFQLDCGSGPGILGISGRAVNDGSWHSVFLELNRNFTSLSLDDSYVERRRAPLYFQTLSTESSIYFGALVQADNIRSLTDTRVTQVLSGFQGCLDSVILNNNELPLQNKRSSFAEVVGLTELKLGCVLYPDACKRSPCQHGGSCTGLPSGGYQCTCLSQFTGRNCESEITACFPNPCRNGGSCDPIGNTFICNCKAGLTGVTCEEDINECEREECENGGSCVNVFGSFLCNCTPGYVGQYCGLRPVVVPNIQAGHSYVGKEELIGIAVVLFVIFILVVLFIVFRKKVFRKNYSRNNITLVQDPATAALLNKSNGIPFRNLRGSGDGRNVYQEVGPPQVPVRPMAYTPCFQSDSRSNLDKIVDGLGGEHQEMTTFHPESPRILTARRGVVVCSVAPNLPAVSPCRSDCDSIRKNGWDAGTENKGVDDPGEVTCFAGSNKGSNSEVQSLSSFQSDSGDDNASIVTVIQLVNNVVDTIENEVSVMDQGQNYNRAYHWDTSDWMPGARLSDIEEVPNYENQDGGSAHQGSTRELESDYYLGGYDIDSEYPPPHEEEFLSQDQLPPPLPEDFPDQYEALPPSQPVSLASTLSPDCRRRPQFHPSQYLPPHPFPNETDLVGPPASCEFSTFAVSMNQGTEPTGPADSVSLSLHNSRGTSSSDVSANCGFDDSEVAMSDYESVGELSLASLHIPFVETQHQTQV

SEQ ID NO: 195 - DNA, 11559 bp, Homo sapiens
  CDS (1)...(11559)
atggatataattatgggacactgtgtgggcacacggcctcctgcttgttgcctcatcctcctgcttttcaagcttttggccactgtctcccaggggctgccagggactggacccctgggcttccacttcacacattccatttataatgctaccgtgtatgagaactcagcagcaaggacctacgtcaacagccagagtagaatgggcatcaccttaatagatctatcctgggatatcaaatacagaatagtgtccggagacgaggaaggctttttcaaagcagaggaagtcatcattgcagatttctgttttctcagaataagaactaaaggtggcaattctgccatattaaatagggaaatccaggataattatttattgatagtaaaaggttctgtcagaggagaggatttggaagcatggaccaaagtgaatatacaggttttagatatgaatgatctgagacctttgttttcacccacaacatactctgttaccatagcagaaagcacacctctaaggactagtgttgcccaggtgactgcaacagacgcagatattggttccaatggagaattctactactactttaaaaataaagttgatctcttttcagttcaccccacgagtggtgtcatctccttaagtggtcgattaaattatgatgaaaagaataggtatgatctggaaattttggctgtggaccggggaatgaaactgtatgggaacaatggagtgagcagtactgcaaagctttatgttcacattgagcgcataaatgaacatgccccaacaatccatgtagtcactcatgttcctttctcgttggaaaaagagccaacatatgcagtggtgacagttgatgacttagatgatggagcgaatggagagatcgaatctgtttccattgtggctggggatcctttagatcagttcttcctggctaaggaaggaaagtggttgaatgagtacaagattaaggagaggaagcagattgactgggagagctttccctatggctacaatctcactcttcaagcaaaagacaagggatctcctcaaaaatgttcagcattaaaggcagtctacattggcaaccccacaagagacactgtccccattagatttgaaaaagaagtgtacgatgtgagcataagtgaattttcccctcctggtgtcgtggttgctatagtaaaattaagtcctgaaccgatagatgtggaatacaaattatctcctggtgaggatgcagtgtactttaaaattaatcctcggtcgggtctgattgttacagcacggccactgaatactgttaagaaggaggtttataaactggaggtgacaaacaaggaaggagatttaaaagcacaggtcaccatcagcatagaagatgcaaatgaccacaccccagaatttcagcaaccactgtatgatgcttatgtgaatgaaagtgtcccagtgggaaccagcgttctaacagtttcagcttctgataaggataaaggagaaaatgggtacatcacctatagtatcgctagcctgaatttgttaccatttgtcattaatcagtttacaggtgttattagcacaactgaagaactggattttgaatcctccccagaaatttacagattcattgttagagcctctgactggggttcaccataccgccatgaaagtgaggtcaatgtgactattcgaataggaaatgtcaacgacaacagccctctctttgaaaaagtggcttgccagggagttatttcatatgactttccagttggtggtcacatcacagcagtctcagcgatcgatatcgatgaacttgaacttgtaaagtacaaaatcatttctggaaatgaacttggcttcttttatttaaacccagattctggtgttttacagcttaaaaaatcactgacaaattctggcattaaaaatggcaattttgccctcagaattacagcaactgatggagagaatcttgcagaccccatgtctattaacatttcagtcctacatgggaaagtgtcttcaaagagcttcagttgcagagaaactcgtgtggctcaaaagctggcagagaaactactcattaaggcaaaagcaaatgggaaactgaatctggaagatggatttcttgacttttattcaattaatagacagggaccatattttgacaagtcttttccttctgatgtggctgtaaaggaggatctgccagttggtgctaacattctgaagattaaagcctatgatgccgactctggcttcaatggaaaagtgctatttacaatatcagatggaaatacggatagttgctttaatattgatatggagactgggcagcttaaagtccttatgcccatggatcgagaacacacagacctctatctccttaatatcaccatctatgacttaggtaatccacagaaatcgtcatggagactgctgaccatcaatgtggaggatgctaatgacaatagcccagtttttattcaagacagttactcagttaacattcttgaaagttcaggcattggtactgaaatcattcaagtggaagccagagacaaagacttaggttctaatggtgaagtgacttactcagtcttgacagatacacagcagtttgccatcaatagctcaactggaatcgtttatgtagccgaccagttggaccgggaatccaaagccaattattctttgaaaatagaagccagggacaaggcagagagtggtcagcagctgttttcagttgtcactcttaaagtttttttagatgatgtcaatgactgctccccagctttcattcccagtagctatagtgtgaaggttcttgaagatctccctgttggcactgtcattgcttggcttgagacccatgatccagatcttggactggggggtcaagtgcgctattctttggtcaatgactataatgggagatttgaaatagataaagcaagtggtgccatccgcttgagcaaagagcttgattatgagaaacagcagttctataaccttactgtgcgggccaaagacaaagggcggcctgtctctctgtcatctgtttcctttgttgaggtggaagtggtggatgtcaatgaaaacctccacactccctatttcccagactttgctgttgttggatctgtaaaggaaaactcacgcattggaacaagcgtgctgcaggtgactgctcgagatgaagactccggaagggatggagagatccagtactccatcagggatggcagtggtcttggaaggttcagtatagacgacgagagtggggtcatcactgccgcagacattcttgatcgggagacaatggggtcatactggctaacagtgtatgccacagacaggggcgttgttccactctactccaccattgaggtctacattgaagttgaagatgtgaatgacaatgccccgctgacctcagaacctatatattatcctgttgtcatggaaaactctccaaaggacgtatctgtcattcagatccaggctgaagatcctgactccagttccaatgaaaaactgacatacaggattacaagtggaaatcctcagaatttttttgccatcaatatcaaaacaggtctgattacaacaacttcaaggaaattggatcgagaacagcaggcagaacattttctggaggtgactgtgacagatggtggtccctctccaaaacagtcaaccatttgggtggtggttcaggttctagatgaaaatgacaacaagccccagttcccagagaaggtctaccagatcaagctgccagaacgtgaccgaaagaagagaggagaaccgatttacagggcttttgcatttgatagagatgagggccccaacgcagaaatctcctacagtattgtggatgggaatgatgacggaaagttctttattgaccctaaaactgggatggtttcttctagaaagcagtttacagcaggcagttatgacatcctaacgataaaggcagtggacaatgggcgcccacagaaatcctccacggcccgcctccacattgaatggattaagaaaccacccccttcacctataccattgaccttcgatgagccgttttataacttcacagtcatggaaagtgatagagtgactgaaattgtaggggtggtgtctgtgcagccagctaacacccctctgtggtttgacatagttggggggaattttgacagcgcttttgatgcagagaagggtgttgggacaattgtcatcgcaaaacctttggatgcagagcagaggtccatctataatatgagtgtggaagtcaccgatgggacaaatgttgctgttactcaggtatttatcaaagtgctggataataatgataatggcccagaattctctcagccgaattacgatgtgacaatttccgaggatgtgcttccagacacggagatcctgcagattgaagccacagatagagatgagaagcacaagctgagctacactgttcatagcagcatcgactccatcagcatgagaaaattccggattgaccctagcactggcgtgctctatactgccgagaggctggaccatgaggcccaggacaagcacattctcaacataatggtcagagatcaggagtttccttatcgaagaaacttggcccgagtcattgtgaatgtggaggatgctaatgatcacagtccttattttaccaacccactgtatgaagcgtctgtgtttgaatctgctgctctgggatcagctgttctgcaagtgacggctctggacaaagacaaaggagaaaatgcagaactcatatataccatagaagcagggaacactgggaacatgtttaagatcgaaccggtcctaggcatcatcaccatttgcaaagaaccagacatgacgacgatgggtcagtttgtcctatccatcaaagtcacagatcagggatccccgccaatgtctgctactgcaattgtgcgcatttccgtcaccatgtctgacaattctcaccccaagttcattcacaaagactaccaagcagaagtaaatgaaaatgttgacattggaacatcagtcattctaatctctgccatcagtcaatctaccctcatttatgaagtcaaagatggagacattaatgggatctttaccataaatccatattctggagtcatcaccactcagaaggccctggattatgagcgcacatcctcttatcaactcatcattcaggccaccaatatggcaggaatggcttccaatgctacagtcaatattcagattgttgatgaaaatgataatgccccagtttttctcttttctcaatactcaggcagcctaagtgaggctgccccaattaatagcattgtcaggagcttggataacagcccactggtgattcgagccacagatgctgacagcaaccggaatgctctgcttgtgtatcagattgtggagtcaacagcaaaaaagtttttcacggtggactccagtacaggtgcaatcagaacaattgccaacctggaccatgaaaccattgcccatttccattttcatgtgcatgtgagagacagtggtagcccccaactgactgcagagagtcccgttgaagtcaacattgaggtgacagatgtgaatgataacccacctgtttttactcaggctgtgtttgagactatcttacttctacctacctatgttggagtggaggttctgaaagttagtgccacagatcctgactctgaggtaccccctgaactgacatacagcctaatggaaggcagtttggatcattttttaattgactcaaacagtggagtacttaccataaaaaacaacaacctctccaaggatcactacatgctgatagttaaggtgtctgatggaaagttctacagtacctccatggtcaccatcatggttaaagaagccatggacagcggcctccactttacacaaagcttctattccacctcaatctcagagaacaacactaacataaccaaagttgctattgtcaatgcagttggaaatcgccttaatgagcccttaaaatacagcatcttaaacccaggaaataagttcaagataaaatctacctcaggggtcattcagacgactggagtcccctttgaccgtgaagaacaagagttatatgagctggtggtagaagccagccgtgagctggaccatctgcgtgtggccagagtggtggtcagggttaacattgaagacataaatgacaattctccagtctttgtgggcctcccatactatgctgctgttcaagtggatgcggaacccgggactctgatttatcaggtgacagccattgacaaagataaaggtccaaatggagaagtgacctatgtcctgcaggatgactatggccactttgaaattaaccctaattcagggaatgttattttaaaggaagcattcaactctgacttgtccaacattgagtatggagtcaccatcctagccaaggatggcggaaaaccttctttgtctacatctgtggagcttcccatcactattgtcaacaaagcaatgcctgtgtttgataagcccttttatacagcatctgtcaatgaagacatcagaatgaacacacccatcctaagcatcaatgccaccagtccagaaggccaaggcatcatatatatcattatcgatggggacccttttaaacagtttaacattgactttgacactggggtcctgaaagttgttagccctttggattatgaagttacatctgcttacaagctgacaataagagccagcgacgcccttactggtgctagggctgaagtcactgttgacttgctagttaatgatgtaaatgacaacccccctattttcgatcagcctacatacaatacaacactatcagaagcatctcttattgggacacctgttttacaagttgtctctattgatgcagactcagaaaacaataaaatggtacattatcagattgtccaggatacctacaatagcacagattattttcacatagatagctcaagtggcttaatcctgacagcacgaatgctggaccatgagttagtacaacactgcactttgaaagtcagatcaatagatagtggcttcccatcactgagcagtgaggttctcgttcatatctacatctctgatgtaaatgacaaccctccagtttttaatcagctcatttatgagtcatatgtgagtgaattagccccccggggccattttgtaacctgtgtacaagcctctgatgcagacagctctgattttgaccggttggaatatagcattttatctgggaatgaccggacgagctttctgatggacagcaagagtggagttatcacattgtccaaccatcggaagcagcggatggagcctctgtacagtctcaatgtgtctgtctctgatgggttgttcaccagcactgcacaggtgcatattagggtacttggggctaacttgtacagccctgccttttcacaaagcacatacgtagctgaggtgagagagaacgtggctgcaggaacaaaggtaattcatgttcgagccacagatggtgatccagggacttatgggcagatcagctatgccatcatcaatgactttgccaaggatcgattcctcatagacagcaatgggcaggtcatcaccacagaaaggctagaccgggaaaaccctctagaaggggatgttagtatttttgtgagggcccttgatggtggagggagaacaactttctgcactgtgagagtgattgttgtggatgaaaatgacaatgctccccagttcatgacagtggaatatagagccagtgtcagggcagatgttggaaggggccacttggtcactcaagttcaagccatagatcccgatgatggagcaaattcaaggattacttattccctctatagcgaggcctctgtttcagtggccgacctcctggaaatcgatcctgacaatggctggatggtcacaaagggtaattttaaccagctgaaaaatacagtgctttcgttctttgtcaaagcagtagatgggggcatcccagtaaagcactccctcattcctgtctatatccacgtcttgccccctgaaacgttcttgccatcattcacccagtctcagtattcctttaccattgcagaagatacagccattgggagtacagtggacaccctgaggattttgcccagtcagaatgtctggttcagcacagttaatggggaacggccagaaaataacaaagggggcgtattcgtcatagaacaggaaacaggcactattaagcttgacaaacgccttgaccgtgaaaccagcccagctttccactttaaagtagcagccactatacccctggacaaagtagacattgtgtttactgtggatgtagatatcaaggtattggatttgaatgacaacaagccagtctttgaaacttcaagctatgacaccattataatggaagggatgcctgttggcaccaaactcacacaagtgagagctattgatatggactggggagccaatggacaagtcacttactccctccactcggattcccagcccgaaaaggtaatggaagcattcaatattgacagcaacacgggctggatcagtaccttgaaggacctagatcacgagacagaccccacattcaccttctctgtggtggcctctgaccttggagaggcattctctctttcctccacggccttggtctctgtcagagtgacagatataaatgacaatgcaccagtcttcgcgcaggaagtgtaccgagggaatgtgaaggagagcgacccaccgggcgaggtggtagccgtcctcagcacctgggacagagacacatccgacgttaatcgccaagtgagctaccatattacaggaggaaaccctcgaggaaggtttgctctgggcctggtgcaaagtgagtggaaggtctatgtgaagaggcctctagacagagaagaacaggacatttactttctcaatatcactgccactgatgggctttttgtcacacaggccatggtggaagtgagcgtcagtgatgtgaatgacaatagcccagtgtgtgatcaggttgcatatacagcattacttcctgaagacattccatcaaataaaatcatcctgaaagtcagtgcaaaggatgctgatattggatccaatggatatatacgatactcactctatggatctggaaacagtgaattttttctagatccagaaagtggcgagttaaaaaccttggctctgttggaccgggagaggatccccgtgtacagcctgatggccaaggccactgacgggggtggcaggttctgccagtccaacatccacctaatcctggaggatgtgaatgataacccccctgtgttttcttctgaccactacaacacctgtgtctatgagaacacagccaccaaggctctgttgaccagagttcaagccgtggaccccgacattggcatcaataggaaggtcgtgtactccctggcagactcagctggtggggtcttctccattgacagctcatctggcatcatcatcctggagcagccactggaccgtgagcagcagtcttcgtacaacatcagcgtgcgggccactgaccagagtcctggacagtccctgtcctctctcactactgtcaccatcaccgttctggacattaatgacaacccccctgtgtttgagaggagggactacctggtgacggtgcctgaggacacctcccctggcacccaagtccttgctgtttttgccaccagcaaagatattggcacaaatgctgagatcacttatctcatccggtctgggaacgaacaagggaaatttaagatcaaccccaagacagggggtatttctgtctctgaagtcctggactatgaattatgcaaaaggttttacctggtagtggaagccaaagatgggggcaccccagctctcagcgctgtggccactgtcaacatcaacctcacagatgttaatgacaaccctcccaagttcagccaagacgtctacagtgcggttatcagtgaagacgccttggtgggagactctgtcattttgctaatagcagaagatgtagacagccagcccaacggacagattcatttttccattgtgaatggagatcgggacaatgaatttactgtagatcctgtcttgggacttgtgaaagttaagaagaaattggaccgggaacgggtgtctggatactctctgcttgtccaggccgtagacagtggcattcctgcaatgtcatcaactgcaactgtcaacattgatatttctgatgtgaatgacaacagcccggtgtttacacctgccaactatactgctgtgattcaggaaaataagccagtgggcaccagcatcttgcagctggtggtgacagacagagactcctttcacaatgggcctcccttttcattctctattttgtcgggaaatgaagaggaggagtttgtgttggaccctcatgggatcttgcggtcggctgtggtcttccagcacacagagtctctggaatacgtgttgtgtgtccaggcaaaggattcaggcaaaccccagcaagtttctcacacttacatccgcgtgcgagtcattgaggaaagcacccacaagcccacagccattcccctggaaattttcattgtcaccatggaggatgactttcctggtggggtcattgggaagattcatgccacagatcaagacatgtatgatgtgctcacatttgccctgaaatcggagcagaaaagcttatttaaagtgaacagtcacgatgggaaaatcatcgccctgggaggcctggacagcggcaagtatgtcctgaatgtgtctgtgagtgatggtcgcttccaggtacccattgatgtggtcgtgcatgtggagcagttggtgcatgagatgctgcagaacactgtcaccatccgctttgaaaatgtgtcccctgaggacttcgtggggctgcacatgcatgggttccggcgcaccctgcggaatgcagtcctcacccagaagcaggacagcctgcgcatcatcagcatccagcccgtggcaggcaccaaccaactggacatgctgtttgcggtggagatgcacagcagcgagttctacaagccagcctacctgatccagaagctgtccaatgctagaagacacctggagaatatcatgcgcatctcagccatcttggagaagaactgctcagggctggactgtcaggaacagcattgtgagcaaggcttgtcactcgattcccacgcgctcatgacctacagcacggctcgcatcagctttgtgtgtccgcgtttctacaggaacgtgcgttgcacctgcaatggaggactgtgtccggggtccaacgatccttgtgtggagaagccgtgtccaggggacatgcagtgtgtcggttatgaagccagcaggagaccgttcctctgccagtgtccaccagggaagctcggagagtgctcagggcacacttctctcagctttgctggaaacagttacatcaaatatcggctttctgaatag

SEQ ID NO: 196 - protein, 3852 aa, Homo sapiens
MDIIMGHCVGTRPPACCLILLLFKLLATVSQGLPGTGPLGFHFTHSIYNATVYENSAARTYVNSQSRMGITLIDLSWDIKYRIVSGDEEGFFKAEEVIIADFCFLRIRTKGGNSAILNREIQDNYLLIVKGSVRGEDLEAWTKVNIQVLDMNDLRPLFSPTTYSVTIAESTPLRTSVAQVTATDADIGSNGEFYYYFKNKVDLFSVHPTSGVISLSGRLNYDEKNRYDLEILAVDRGMKLYGNNGVSSTAKLYVHIERINEHAPTIHVVTHVPFSLEKEPTYAVVTVDDLDDGANGEIESVSIVAGDPLDQFFLAKEGKWLNEYKIKERKQIDWESFPYGYNLTLQAKDKGSPQKCSALKAVYIGNPTRDTVPIRFEKEVYDVSISEFSPPGVVVAIVKLSPEPIDVEYKLSPGEDAVYFKINPRSGLIVTARPLNTVKKEVYKLEVTNKEGDLKAQVTISIEDANDHTPEFQQPLYDAYVNESVPVGTSVLTVSASDKDKGENGYITYSIASLNLLPFVINQFTGVISTTEELDFESSPEIYRFIVRASDWGSPYRHESEVNVTIRIGNVNDNSPLFEKVACQGVISYDFPVGGHITAVSAIDIDELELVKYKIISGNELGFFYLNPDSGVLQLKKSLTNSGIKNGNFALRITATDGENLADPMSINISVLHGKVSSKSFSCRETRVAQKLAEKLLIKAKANGKLNLEDGFLDFYSINRQGPYFDKSFPSDVAVKEDLPVGANILKIKAYDADSGFNGKVLFTISDGNTDSCFNIDMETGQLKVLMPMDREHTDLYLLNITIYDLGNPQKSSWRLLTINVEDANDNSPVFIQDSYSVNILESSGIGTEIIQVEARDKDLGSNGEVTYSVLTDTQQFAINSSTGIVYVADQLDRESKANYSLKIEARDKAESGQQLFSVVTLKVFLDDVNDCSPAFIPSSYSVKVLEDLPVGTVIAWLETHDPDLGLGGQVRYSLVNDYNGRFEIDKASGAIRLSKELDYEKQQFYNLTVRAKDKGRPVSLSSVSFVEVEVVDVNENLHTPYFPDFAVVGSVKENSRIGTSVLQVTARDEDSGRDGEIQYSIRDGSGLGRFSIDDESGVITAADILDRETMGSYWLTVYATDRGVVPLYSTIEVYIEVEDVNDNAPLTSEPIYYPVVMENSPKDVSVIQIQAEDPDSSSNEKLTYRITSGNPQNFFAINIKTGLITTTSRKLDREQQAEHFLEVTVTDGGPSPKQSTIWVVVQVLDENDNKPQFPEKVYQIKLPERDRKKRGEPIYRAFAFDRDEGPNAEISYSIVDGNDDGKFFIDPKTGMVSSRKQFTAGSYDILTIKAVDNGRPQKSSTARLHIEWIKKPPPSPIPLTFDEPFYNFTVMESDRVTEIVGVVSVQPANTPLWFDIVGGNFDSAFDAEKGVGTIVIAKPLDAEQRSIYNMSVEVTDGTNVAVTQVFIKVLDNNDNGPEFSQPNYDVTISEDVLPDTEILQIEATDRDEKHKLSYTVHSSIDSISMRKFRIDPSTGVLYTAERLDHEAQDKHILNIMVRDQEFPYRRNLARVIVNVEDANDHSPYFTNPLYEASVFESAALGSAVLQVTALDKDKGENAELIYTIEAGNTGNMFKIEPVLGIITICKEPDMTTMGQFVLSIKVTDQGSPPMSATAIVRISVTMSDNSHPKFIHKDYQAEVNENVDIGTSVILISAISQSTLIYEVKDGDINGIFTINPYSGVITTQKALDYERTSSYQLIIQATNMAGMASNATVNIQIVDENDNAPVFLFSQYSGSLSEAAPINSIVRSLDNSPLVIRATDADSNRNALLVYQIVESTAKKFFTVDSSTGAIRTIANLDHETIAHFHFHVHVRDSGSPQLTAESPVEVNIEVTDVNDNPPVFTQAVFETILLLPTYVGVEVLKVSATDPDSEVPPELTYSLMEGSLDHFLIDSNSGVLTIKNNNLSKDHYMLIVKVSDGKFYSTSMVTIMVKEAMDSGLHFTQSFYSTSISENNTNITKVAIVNAVGNRLNEPLKYSILNPGNKFKIKSTSGVIQTTGVPFDREEQELYELVVEASRELDHLRVARVVVRVNIEDINDNSPVFVGLPYYAAVQVDAEPGTLIYQVTAIDKDKGPNGEVTYVLQDDYGHFEINPNSGNVILKEAFNSDLSNIEYGVTILAKDGGKPSLSTSVELPITIVNKAMPVFDKPFYTASVNEDIRMNTPILSINATSPEGQGIIYIIIDGDPFKQFNIDFDTGVLKVVSPLDYEVTSAYKLTIRASDALTGARAEVTVDLLVNDVNDNPPIFDQPTYNTTLSEASLIGTPVLQVVSIDADSENNKMVHYQIVQDTYNSTDYFHIDSSSGLILTARMLDHELVQHCTLKVRSIDSGFPSLSSEVLVHIYISDVNDNPPVFNQLIYESYVSELAPRGHFVTCVQASDADSSDFDRLEYSILSGNDRTSFLMDSKSGVITLSNHRKQRMEPLYSLNVSVSDGLFTSTAQVHIRVLGANLYSPAFSQSTYVAEVRENVAAGTKVIHVRATDGDPGTYGQISYAIINDFAKDRFLIDSNGQVITTERLDRENPLEGDVSIFVRALDGGGRTTFCTVRVIVVDENDNAPQFMTVEYRASVRADVGRGHLVTQVQAIDPDDGANSRITYSLYSEASVSVADLLEIDPDNGWMVTKGNFNQLKNTVLSFFVKAVDGGIPVKHSLIPVYIHVLPPETFLPSFTQSQYSFTIAEDTAIGSTVDTLRILPSQNVWFSTVNGERPENNKGGVFVIEQETGTIKLDKRLDRETSPAFHFKVAATIPLDKVDIVFTVDVDIKVLDLNDNKPVFETSSYDTIIMEGMPVGTKLTQVRAIDMDWGANGQVTYSLHSDSQPEKVMEAFNIDSNTGWISTLKDLDHETDPTFTFSVVASDLGEAFSLSSTALVSVRVTDINDNAPVFAQEVYRGNVKESDPPGEVVAVLSTWDRDTSDVNRQVSYHITGGNPRGRFALGLVQSEWKVYVKRPLDREEQDIYFLNITATDGLFVTQAMVEVSVSDVNDNSPVCDQVAYTALLPEDIPSNKIILKVSAKDADIGSNGYIRYSLYGSGNSEFFLDPESGELKTLALLDRERIPVYSLMAKATDGGGRFCQSNIHLILEDVNDNPPVFSSDHYNTCVYENTATKALLTRVQAVDPDIGINRKVVYSLADSAGGVFSIDSSSGIIILEQPLDREQQSSYNISVRATDQSPGQSLSSLTTVTITVLDINDNPPVFERRDYLVTVPEDTSPGTQVLAVFATSKDIGTNAEITYLIRSGNEQGKFKINPKTGGISVSEVLDYELCKRFYLVVEAKDGGTPALSAVATVNINLTDVNDNPPKFSQDVYSAVISEDALVGDSVILLIAEDVDSQPNGQIHFSIVNGDRDNEFTVDPVLGLVKVKKKLDRERVSGYSLLVQAVDSGIPAMSSTATVNIDISDVNDNSPVFTPANYTAVIQENKPVGTSILQLVVTDRDSFHNGPPFSFSILSGNEEEEFVLDPHGILRSAVVFQHTESLEYVLCVQAKDSGKPQQVSHTYIRVRVIEESTHKPTAIPLEIFIVTMEDDFPGGVIGKIHATDQDMYDVLTFALKSEQKSLFKVNSHDGKIIALGGLDSGKYVLNVSVSDGRFQVPIDVVVHVEQLVHEMLQNTVTIRFENVSPEDFVGLHMHGFRRTLRNAVLTQKQDSLRIISIQPVAGTNQLDMLFAVEMHSSEFYKPAYLIQKLSNARRHLENIMRISAILEKNCSGLDCQEQHCEQGLSLDSHALMTYSTARISFVCPRFYRNVRCTCNGGLCPGSNDPCVEKPCPGDMQCVGYEASRRPFLCQCPPGKLGECSGHTSLSFAGNSYIKYRLSE

SEQ ID NO: 197 - DNA, 13758 bp, Homo sapiens
  CDS (1)...(13758)
atgggacactgtgtgggcacacggcctcctgcttgttgcctcatcctcctgcttttcaagcttttggccactgtctcccaggggctgccagggactggacccctgggcttccacttcacacattccatttataatgctaccgtgtatgagaactcagcagcaaggacctacgtcaacagccagagtagaatgggcatcaccttaatagatctatcctgggatatcaaatacagaatagtgtccggagacgaggaaggctttttcaaagcagaggaagtcatcattgcagatttctgttttctcagaataagaactaaaggtggcaattctgccatattaaatagggaaatccaggataattatttattgatagtaaaaggttctgtcagaggagaggatttggaagcatggaccaaagtgaatatacaggttttagatatgaatgatctgagacctttgttttcacccacaacatactctgttaccatagcagaaagcacacctctaaggactagtgttgcccaggtgactgcaacagacgcagatattggttccaatggagaattctactactactttaaaaataaagttgatctcttttcagttcaccccacgagtggtgtcatctccttaagtggtcgattaaattatgatgaaaagaataggtatgatctggaaattttggctgtggaccggggaatgaaactgtatgggaacaatggagtgagcagtactgcaaagctttatgttcacattgagcgcataaatgaacatgccccaacaatccatgtagtcactcatgttcctttctcgttggaaaaagagccaacatatgcagtggtgacagttgatgacttagatgatggagcgaatggagagatcgaatctgtttccattgtggctggggatcctttagatcagttcttcctggctaaggaaggaaagtggttgaatgagtacaagattaaggagaggaagcagattgactgggagagctttccctatggctacaatctcactcttcaagcaaaagacaagggatctcctcaaaaatgttcagcattaaaggcagtctacattggcaaccccacaagagacactgtccccattagatttgaaaaagaagtgtacgatgtgagcataagtgaattttcccctcctggtgtcgtggttgctatagtaaaattaagtcctgaaccgatagatgtggaatacaaattatctcctggtgaggatgcagtgtactttaaaattaatcctcggtcgggtctgattgttacagcacggccactgaatactgttaagaaggaggtttataaactggaggtgacaaacaaggaaggagatttaaaagcacaggtcaccatcagcatagaagatgcaaatgaccacaccccagaatttcagcaaccactgtatgatgcttatgtgaatgaaagtgtcccagtgggaaccagcgttctaacagtttcagcttctgataaggataaaggagaaaatgggtacatcacctatagtatcgctagcctgaatttgttaccatttgtcattaatcagtttacaggtgttattagcacaactgaagaactggattttgaatcctccccagaaatttacagattcattgttagagcctctgactggggttcaccataccgccatgaaagtgaggtcaatgtgactattcgaataggaaatgtcaacgacaacagccctctctttgaaaaagtggcttgccagggagttatttcatatgactttccagttggtggtcacatcacagcagtctcagcgatcgatatcgatgaacttgaacttgtaaagtacaaaatcatttctggaaatgaacttggcttcttttatttaaacccagattctggtgttttacagcttaaaaaatcactgacaaattctggcattaaaaatggcaattttgccctcagaattacagcaactgatggagagaatcttgcagaccccatgtctattaacatttcagtcctacatgggaaagtgtcttcaaagagcttcagttgcagagaaactcgtgtggctcaaaagctggcagagaaactactcattaaggcaaaagcaaatgggaaactgaatctggaagatggatttcttgacttttattcaattaatagacagggaccatattttgacaagtcttttccttctgatgtggctgtaaaggaggatctgccagttggtgctaacattctgaagattaaagcctatgatgccgactctggcttcaatggaaaagtgctatttacaatatcagatggaaatacggatagttgctttaatattgatatggagactgggcagcttaaagtccttatgcccatggatcgagaacacacagacctctatctccttaatatcaccatctatgacttaggtaatccacagaaatcgtcatggagactgctgaccatcaatgtggaggatgctaatgacaatagcccagtttttattcaagacagttactcagttaacattcttgaaagttcaggcattggtactgaaatcattcaagtggaagccagagacaaagacttaggttctaatggtgaagtgacttactcagtcttgacagatacacagcagtttgccatcaatagctcaactggaatcgtttatgtagccgaccagttggaccgggaatccaaagccaattattctttgaaaatagaagccagggacaaggcagagagtggtcagcagctgttttcagttgtcactcttaaagtttttttagatgatgtcaatgactgctccccagctttcattcccagtagctatagtgtgaaggttcttgaagatctccctgttggcactgtcattgcttggcttgagacccatgatccagatcttggactggggggtcaagtgcgctattctttggtcaatgactataatgggagatttgaaatagataaagcaagtggtgccatccgcttgagcaaagagcttgattatgagaaacagcagttctataaccttactgtgcgggccaaagacaaagggcggcctgtctctctgtcatctgtttcctttgttgaggtggaagtggtggatgtcaatgaaaacctccacactccctatttcccagactttgctgttgttggatctgtaaaggaaaactcacgcattggaacaagcgtgctgcaggtgactgctcgagatgaagactccggaagggatggagagatccagtactccatcagggatggcagtggtcttggaaggttcagtatagacgacgagagtggggtcatcactgccgcagacattcttgatcgggagacaatggggtcatactggctaacagtgtatgccacagacaggggcgttgttccactctactccaccattgaggtctacattgaagttgaagatgtgaatgacaatgccccgctgacctcagaacctatatattatcctgttgtcatggaaaactctccaaaggacgtatctgtcattcagatccaggctgaagatcctgactccagttccaatgaaaaactgacatacaggattacaagtggaaatcctcagaatttttttgccatcaatatcaaaacaggtctgattacaacaacttcaaggaaattggatcgagaacagcaggcagaacattttctggaggtgactgtgacagatggtggtccctctccaaaacagtcaaccatttgggtggtggttcaggttctagatgaaaatgacaacaagccccagttcccagagaaggtctaccagatcaagctgccagaacgtgaccgaaagaagagaggagaaccgatttacagggcttttgcatttgatagagatgagggccccaacgcagaaatctcctacagtattgtggatgggaatgatgacggaaagttctttattgaccctaaaactgggatggtttcttctagaaagcagtttacagcaggcagttatgacatcctaacgataaaggcagtggacaatgggcgcccacagaaatcctccacggcccgcctccacattgaatggattaagaaaccacccccttcacctataccattgaccttcgatgagccgttttataacttcacagtcatggaaagtgatagagtgactgaaattgtaggggtggtgtctgtgcagccagctaacacccctctgtggtttgacatagttggggggaattttgacagcgcttttgatgcagagaagggtgttgggacaattgtcatcgcaaaacctttggatgcagagcagaggtccatctataatatgagtgtggaagtcaccgatgggacaaatgttgctgttactcaggtatttatcaaagtgctggataataatgataatggcccagaattctctcagccgaattacgatgtgacaatttccgaggatgtgcttccagacacggagatcctgcagattgaagccacagatagagatgagaagcacaagctgagctacactgttcatagcagcatcgactccatcagcatgagaaaattccggattgaccctagcactggcgtgctctatactgccgagaggctggaccatgaggcccaggacaagcacattctcaacataatggtcagagatcaggagtttccttatcgaagaaacttggcccgagtcattgtgaatgtggaggatgctaatgatcacagtccttattttaccaacccactgtatgaagcgtctgtgtttgaatctgctgctctgggatcagctgttctgcaagtgacggctctggacaaagacaaaggagaaaatgcagaactcatatataccatagaagcagggaacactgggaacatgtttaagatcgaaccggtcctaggcatcatcaccatttgcaaagaaccagacatgacgacgatgggtcagtttgtcctatccatcaaagtcacagatcagggatccccgccaatgtctgctactgcaattgtgcgcatttccgtcaccatgtctgacaattctcaccccaagttcattcacaaagactaccaagcagaagtaaatgaaaatgttgacattggaacatcagtcattctaatctctgccatcagtcaatctaccctcatttatgaagtcaaagatggagacattaatgggatctttaccataaatccatattctggagtcatcaccactcagaaggccctggattatgagcgcacatcctcttatcaactcatcattcaggccaccaatatggcaggaatggcttccaatgctacagtcaatattcagattgttgatgaaaatgataatgccccagtttttctcttttctcaatactcaggcagcctaagtgaggctgccccaattaatagcattgtcaggagcttggataacagcccactggtgattcgagccacagatgctgacagcaaccggaatgctctgcttgtgtatcagattgtggagtcaacagcaaaaaagtttttcacggtggactccagtacaggtgcaatcagaacaattgccaacctggaccatgaaaccattgcccatttccattttcatgtgcatgtgagagacagtggtagcccccaactgactgcagagagtcccgttgaagtcaacattgaggtgacagatgtgaatgataacccacctgtttttactcaggctgtgtttgagactatcttacttctacctacctatgttggagtggaggttctgaaagttagtgccacagatcctgactctgaggtaccccctgaactgacatacagcctaatggaaggcagtttggatcattttttaattgactcaaacagtggagtacttaccataaaaaacaacaacctctccaaggatcactacatgctgatagttaaggtgtctgatggaaagttctacagtacctccatggtcaccatcatggttaaagaagccatggacagcggcctccactttacacaaagcttctattccacctcaatctcagagaacaacactaacataaccaaagttgctattgtcaatgcagttggaaatcgccttaatgagcccttaaaatacagcatcttaaacccaggaaataagttcaagataaaatctacctcaggggtcattcagacgactggagtcccctttgaccgtgaagaacaagagttatatgagctggtggtagaagccagccgtgagctggaccatctgcgtgtggccagagtggtggtcagggttaacattgaagacataaatgacaattctccagtctttgtgggcctcccatactatgctgctgttcaagtggatgcggaacccgggactctgatttatcaggtgacagccattgacaaagataaaggtccaaatggagaagtgacctatgtcctgcaggatgactatggccactttgaaattaaccctaattcagggaatgttattttaaaggaagcattcaactctgacttgtccaacattgagtatggagtcaccatcctagccaaggatggcggaaaaccttctttgtctacatctgtggagcttcccatcactattgtcaacaaagcaatgcctgtgtttgataagcccttttatacagcatctgtcaatgaagacatcagaatgaacacacccatcctaagcatcaatgccaccagtccagaaggccaaggcatcatatatatcattatcgatggggacccttttaaacagtttaacattgactttgacactggggtcctgaaagttgttagccctttggattatgaagttacatctgcttacaagctgacaataagagccagcgacgcccttactggtgctagggctgaagtcactgttgacttgctagttaatgatgtaaatgacaacccccctattttcgatcagcctacatacaatacaacactatcagaagcatctcttattgggacacctgttttacaagttgtctctattgatgcagactcagaaaacaataaaatggtacattatcagattgtccaggatacctacaatagcacagattattttcacatagatagctcaagtggcttaatcctgacagcacgaatgctggaccatgagttagtacaacactgcactttgaaagtcagatcaatagatagtggcttcccatcactgagcagtgaggttctcgttcatatctacatctctgatgtaaatgacaaccctccagtttttaatcagctcatttatgagtcatatgtgagtgaattagccccccggggccattttgtaacctgtgtacaagcctctgatgcagacagctctgattttgaccggttggaatatagcattttatctgggaatgaccggacgagctttctgatggacagcaagagtggagttatcacattgtccaaccatcggaagcagcggatggagcctctgtacagtctcaatgtgtctgtctctgatgggttgttcaccagcactgcacaggtgcatattagggtacttggggctaacttgtacagccctgccttttcacaaagcacatacgtagctgaggtgagagagaacgtggctgcaggaacaaaggtaattcatgttcgagccacagatggtgatccagggacttatgggcagatcagctatgccatcatcaatgactttgccaaggatcgattcctcatagacagcaatgggcaggtcatcaccacagaaaggctagaccgggaaaaccctctagaaggggatgttagtatttttgtgagggcccttgatggtggagggagaacaactttctgcactgtgagagtgattgttgtggatgaaaatgacaatgctccccagttcatgacagtggaatatagagccagtgtcagggcagatgttggaaggggccacttggtcactcaagttcaagccatagatcccgatgatggagcaaattcaaggattacttattccctctatagcgaggcctctgtttcagtggccgacctcctggaaatcgatcctgacaatggctggatggtcacaaagggtaattttaaccagctgaaaaatacagtgctttcgttctttgtcaaagcagtagatgggggcatcccagtaaagcactccctcattcctgtctatatccacgtcttgccccctgaaacgttcttgccatcattcacccagtctcagtattcctttaccattgcagaagatacagccattgggagtacagtggacaccctgaggattttgcccagtcagaatgtctggttcagcacagttaatggggaacggccagaaaataacaaagggggcgtattcgtcatagaacaggaaacaggcactattaagcttgacaaacgccttgaccgtgaaaccagcccagctttccactttaaagtagcagccactatacccctggacaaagtagacattgtgtttactgtggatgtagatatcaaggtattggatttgaatgacaacaagccagtctttgaaacttcaagctatgacaccattataatggaagggatgcctgttggcaccaaactcacacaagtgagagctattgatatggactggggagccaatggacaagtcacttactccctccactcggattcccagcccgaaaaggtaatggaagcattcaatattgacagcaacacgggctggatcagtaccttgaaggacctagatcacgagacagaccccacattcaccttctctgtggtggcctctgaccttggagaggcattctctctttcctccacggccttggtctctgtcagagtgacagatataaatgacaatgcaccagtcttcgcgcaggaagtgtaccgagggaatgtgaaggagagcgacccaccgggcgaggtggtagccgtcctcagcacctgggacagagacacatccgacgttaatcgccaagtgagctaccatattacaggaggaaaccctcgaggaaggtttgctctgggcctggtgcaaagtgagtggaaggtctatgtgaagaggcctctagacagagaagaacaggacatttactttctcaatatcactgccactgatgggctttttgtcacacaggccatggtggaagtgagcgtcagtgatgtgaatgacaatagcccagtgtgtgatcaggttgcatatacagcattacttcctgaagacattccatcaaataaaatcatcctgaaagtcagtgcaaaggatgctgatattggatccaatggatatatacgatactcactctatggatctggaaacagtgaattttttctagatccagaaagtggcgagttaaaaaccttggctctgttggaccgggagaggatccccgtgtacagcctgatggccaaggccactgacgggggtggcaggttctgccagtccaacatccacctaatcctggaggatgtgaatgataacccccctgtgttttcttctgaccactacaacacctgtgtctatgagaacacagccaccaaggctctgttgaccagagttcaagccgtggaccccgacattggcatcaataggaaggtcgtgtactccctggcagactcagctggtggggtcttctccattgacagctcatctggcatcatcatcctggagcagccactggaccgtgagcagcagtcttcgtacaacatcagcgtgcgggccactgaccagagtcctggacagtccctgtcctctctcactactgtcaccatcaccgttctggacattaatgacaacccccctgtgtttgagaggagggactacctggtgacggtgcctgaggacacctcccctggcacccaagtccttgctgtttttgccaccagcaaagatattggcacaaatgctgagatcacttatctcatccggtctgggaacgaacaagggaaatttaagatcaaccccaagacagggggtatttctgtctctgaagtcctggactatgaattatgcaaaaggttttacctggtagtggaagccaaagatgggggcaccccagctctcagcgctgtggccactgtcaacatcaacctcacagatgttaatgacaaccctcccaagttcagccaagacgtctacagtgcggttatcagtgaagacgccttggtgggagactctgtcattttgctaatagcagaagatgtagacagccagcccaacggacagattcatttttccattgtgaatggagatcgggacaatgaatttactgtagatcctgtcttgggacttgtgaaagttaagaagaaattggaccgggaacgggtgtctggatactctctgcttgtccaggccgtagacagtggcattcctgcaatgtcatcaactgcaactgtcaacattgatatttctgatgtgaatgacaacagcccggtgtttacacctgccaactatactgctgtgattcaggaaaataagccagtgggcaccagcatcttgcagctggtggtgacagacagagactcctttcacaatgggcctcccttttcattctctattttgtcgggaaatgaagaggaggagtttgtgttggaccctcatgggatcttgcggtcggctgtggtcttccagcacacagagtctctggaatacgtgttgtgtgtccaggcaaaggattcaggcaaaccccagcaagtttctcacacttacatccgcgtgcgagtcattgaggaaagcacccacaagcccacagccattcccctggaaattttcattgtcaccatggaggatgactttcctggtggggtcattgggaagattcatgccacagatcaagacatgtatgatgtgctcacatttgccctgaaatcggagcagaaaagcttatttaaagtgaacagtcacgatgggaaaatcatcgccctgggaggcctggacagcggcaagtatgtcctgaatgtgtctgtgagtgatggtcgcttccaggtacccattgatgtggtcgtgcatgtggagcagttggtgcatgagatgctgcagaacactgtcaccatccgctttgaaaatgtgtcccctgaggacttcgtggggctgcacatgcatgggttccggcgcaccctgcggaatgcagtcctcacccagaagcaggacagcctgcgcatcatcagcatccagcccgtggcaggcaccaaccaactggacatgctgtttgcggtggagatgcacagcagcgagttctacaagccagcctacctgatccagaagctgtccaatgctagaagacacctggagaatatcatgcgcatctcagccatcttggagaagaactgctcagggctggactgtcaggaacagcattgtgagcaaggcttgtcactcgattcccacgcgctcatgacctacagcacggctcgcatcagctttgtgtgtccgcgtttctacaggaacgtgcgttgcacctgcaatggaggactgtgtccggggtccaacgatccttgtgtggagaagccgtgtccaggggacatgcagtgtgtcggttatgaagccagcaggagaccgttcctctgccagtgtccaccagggaagctcggagagtgctcagggcacacttctctcagctttgctggaaacagttacatcaaatatcggctttctgaaaatagcaaagaagaggatttcaaactagctctgcgtcttcgaacactgcaaagcaatgggattataatgtacaccagagcaaatccctgcataattctgaagattgtggatggcaagctgtggttccagctggactgcggcagcggccctggaatcttgggcatctcgggccgtgctgtcaacgacgggagctggcactcggtcttcctggagctcaaccgcaatttcacgagcctgtccctggatgacagctacgtggagcggcgccgggcgcccctctacttccagacgctgagcactgagagtagcatctacttcggcgccctggtgcaagcggataacatccgcagcctgactgacacgcgggtcacgcaggtgctcagcggcttccagggctgcctggactcggtgatactgaataacaatgagctgccgctgcagaacaagcgcagcagcttcgcggaggtggtgggcctgacggagctgaagctgggctgcgtgctctatcccgacgcctgcaagcgcagcccgtgccagcacgggggcagctgcactggcctgccatcggggggctatcagtgtacctgtctctcacagtttacggggagaaactgtgaatctgagattacagcctgcttcccaaacccctgccggaatggaggatcctgcgatccaataggaaacactttcatctgcaattgtaaagctgggctcactggagtcacgtgtgaggaggacatcaatgagtgcgaacgagaggagtgtgagaacggaggctcctgcgtgaacgtgttcggctccttcctctgcaactgcacgccgggctacgtgggccagtactgcgggctgcgccccgtggtggtacccaatatccaggctggccactcctacgtggggaaggaggagctcatcggcatcgccgtggtcctcttcgtcatcttcatcctggtggttctcttcatagtcttccgcaagaaggtcttccgcaagaactactcccgcaacaacatcacgctagtgcaggacccggccaccgccgccctgcttaacaagagcaatggcatcccgttccggaacctgcgcggcagtggggacggccgcaacgtctaccaggaggtggggcccccgcaggtccccgtgcgccccatggcctacacaccctgcttccagagtgactccaggagcaacctggataagatcgtggacgggctgggaggcgagcaccaggaaatgaccacgtttcaccctgagtcgccccgcatcctgacagcccggcggggcgtggtcgtgtgcagtgtggcccccaacctccccgccgtgtcaccctgccgctccgactgcgactccatccggaagaatggctgggacgcgggaactgagaacaaaggggttgatgacccgggagaagtgacctgctttgcaggtagtaataaaggcagcaactctgaagttcagtccctcagctccttccagtcagattctggtgacgacaatgcctccatagtgactgtcattcagcttgtcaacaatgtagttgacactatagagaatgaagtgtctgtcatggaccaaggacagaactacaaccgagcctatcactgggacacctctgattggatgccaggggcccgcctgtcggacatagaggaagtgcccaactatgagaaccaggatggagggtctgcacaccaggggagcacacgggagctggagagcgattactacctgggtggttatgacattgacagtgaatacccaccccctcatgaagaggagttcttgagtcaggaccagctgcctcctcctctcccggaggacttcccagaccaatatgaggccctgccaccctcccagcctgtctccctggccagcacactgagcccagactgcaggagaaggccccagtttcatcctagccagtatctccctcctcacccattccccaacgaaacggatttggtgggcccgcctgccagctgtgaatttagtacttttgctgtgagcatgaaccagggcacagagcccacaggcccagcagacagcgtgtctctgtccttgcacaattccagaggcacctcatcctcggatgtgtctgccaactgcggctttgacgattccgaagtagccatgagtgactacgagagcgtgggagagctcagcctcgccagccttcacattccctttgtggagactcagcatcagactcaagtgtag

SEQ ID NO: 198 - protein, 4585 aa, Homo sapiens
MGHCVGTRPPACCLILLLFKLLATVSQGLPGTGPLGFHFTHSIYNATVYENSAARTYVNSQSRMGITLIDLSWDIKYRIVSGDEEGFFKAEEVIIADFCFLRIRTKGGNSAILNREIQDNYLLIVKGSVRGEDLEAWTKVNIQVLDMNDLRPLFSPTTYSVTIAESTPLRTSVAQVTATDADIGSNGEFYYYFKNKVDLFSVHPTSGVISLSGRLNYDEKNRYDLEILAVDRGMKLYGNNGVSSTAKLYVHIERINEHAPTIHVVTHVPFSLEKEPTYAVVTVDDLDDGANGEIESVSIVAGDPLDQFFLAKEGKWLNEYKIKERKQIDWESFPYGYNLTLQAKDKGSPQKCSALKAVYIGNPTRDTVPIRFEKEVYDVSISEFSPPGVVVAIVKLSPEPIDVEYKLSPGEDAVYFKINPRSGLIVTARPLNTVKKEVYKLEVTNKEGDLKAQVTISIEDANDHTPEFQQPLYDAYVNESVPVGTSVLTVSASDKDKGENGYITYSIASLNLLPFVINQFTGVISTTEELDFESSPEIYRFIVRASDWGSPYRHESEVNVTIRIGNVNDNSPLFEKVACQGVISYDFPVGGHITAVSAIDIDELELVKYKIISGNELGFFYLNPDSGVLQLKKSLTNSGIKNGNFALRITATDGENLADPMSINISVLHGKVSSKSFSCRETRVAQKLAEKLLIKAKANGKLNLEDGFLDFYSINRQGPYFDKSFPSDVAVKEDLPVGANILKIKAYDADSGFNGKVLFTISDGNTDSCFNIDMETGQLKVLMPMDREHTDLYLLNITIYDLGNPQKSSWRLLTINVEDANDNSPVFIQDSYSVNILESSGIGTEIIQVEARDKDLGSNGEVTYSVLTDTQQFAINSSTGIVYVADQLDRESKANYSLKIEARDKAESGQQLFSVVTLKVFLDDVNDCSPAFIPSSYSVKVLEDLPVGTVIAWLETHDPDLGLGGQVRYSLVNDYNGRFEIDKASGAIRLSKELDYEKQQFYNLTVRAKDKGRPVSLSSVSFVEVEVVDVNENLHTPYFPDFAVVGSVKENSRIGTSVLQVTARDEDSGRDGEIQYSIRDGSGLGRFSIDDESGVITAADILDRETMGSYWLTVYATDRGVVPLYSTIEVYIEVEDVNDNAPLTSEPIYYPVVMENSPKDVSVIQIQAEDPDSSSNEKLTYRITSGNPQNFFAINIKTGLITTTSRKLDREQQAEHFLEVTVTDGGPSPKQSTIWVVVQVLDENDNKPQFPEKVYQIKLPERDRKKRGEPIYRAFAFDRDEGPNAEISYSIVDGNDDGKFFIDPKTGMVSSRKQFTAGSYDILTIKAVDNGRPQKSSTARLHIEWIKKPPPSPIPLTFDEPFYNFTVMESDRVTEIVGVVSVQPANTPLWFDIVGGNFDSAFDAEKGVGTIVIAKPLDAEQRSIYNMSVEVTDGTNVAVTQVFIKVLDNNDNGPEFSQPNYDVTISEDVLPDTEILQIEATDRDEKHKLSYTVHSSIDSISMRKFRIDPSTGVLYTAERLDHEAQDKHILNIMVRDQEFPYRRNLARVIVNVEDANDHSPYFTNPLYEASVFESAALGSAVLQVTALDKDKGENAELIYTIEAGNTGNMFKIEPVLGIITICKEPDMTTMGQFVLSIKVTDQGSPPMSATAIVRISVTMSDNSHPKFIHKDYQAEVNENVDIGTSVILISAISQSTLIYEVKDGDINGIFTINPYSGVITTQKALDYERTSSYQLIIQATNMAGMASNATVNIQIVDENDNAPVFLFSQYSGSLSEAAPINSIVRSLDNSPLVIRATDADSNRNALLVYQIVESTAKKFFTVDSSTGAIRTIANLDHETIAHFHFHVHVRDSGSPQLTAESPVEVNIEVTDVNDNPPVFTQAVFETILLLPTYVGVEVLKVSATDPDSEVPPELTYSLMEGSLDHFLIDSNSGVLTIKNNNLSKDHYMLIVKVSDGKFYSTSMVTIMVKEAMDSGLHFTQSFYSTSISENNTNITKVAIVNAVGNRLNEPLKYSILNPGNKFKIKSTSGVIQTTGVPFDREEQELYELVVEASRELDHLRVARVVVRVNIEDINDNSPVFVGLPYYAAVQVDAEPGTLIYQVTAIDKDKGPNGEVTYVLQDDYGHFEINPNSGNVILKEAFNSDLSNIEYGVTILAKDGGKPSLSTSVELPITIVNKAMPVFDKPFYTASVNEDIRMNTPILSINATSPEGQGIIYIIIDGDPFKQFNIDFDTGVLKVVSPLDYEVTSAYKLTIRASDALTGARAEVTVDLLVNDVNDNPPIFDQPTYNTTLSEASLIGTPVLQVVSIDADSENNKMVHYQIVQDTYNSTDYFHIDSSSGLILTARMLDHELVQHCTLKVRSIDSGFPSLSSEVLVHIYISDVNDNPPVFNQLIYESYVSELAPRGHFVTCVQASDADSSDFDRLEYSILSGNDRTSFLMDSKSGVITLSNHRKQRMEPLYSLNVSVSDGLFTSTAQVHIRVLGANLYSPAFSQSTYVAEVRENVAAGTKVIHVRATDGDPGTYGQISYAIINDFAKDRFLIDSNGQVITTERLDRENPLEGDVSIFVRALDGGGRTTFCTVRVIVVDENDNAPQFMTVEYRASVRADVGRGHLVTQVQAIDPDDGANSRITYSLYSEASVSVADLLEIDPDNGWMVTKGNFNQLKNTVLSFFVKAVDGGIPVKHSLIPVYIHVLPPETFLPSFTQSQYSFTIAEDTAIGSTVDTLRILPSQNVWFSTVNGERPENNKGGVFVIEQETGTIKLDKRLDRETSPAFHFKVAATIPLDKVDIVFTVDVDIKVLDLNDNKPVFETSSYDTIIMEGMPVGTKLTQVRAIDMDWGANGQVTYSLHSDSQPEKVMEAFNIDSNTGWISTLKDLDHETDPTFTFSVVASDLGEAFSLSSTALVSVRVTDINDNAPVFAQEVYRGNVKESDPPGEVVAVLSTWDRDTSDVNRQVSYHITGGNPRGRFALGLVQSEWKVYVKRPLDREEQDIYFLNITATDGLFVTQAMVEVSVSDVNDNSPVCDQVAYTALLPEDIPSNKIILKVSAKDADIGSNGYIRYSLYGSGNSEFFLDPESGELKTLALLDRERIPVYSLMAKATDGGGRFCQSNIHLILEDVNDNPPVFSSDHYNTCVYENTATKALLTRVQAVDPDIGINRKVVYSLADSAGGVFSIDSSSGIIILEQPLDREQQSSYNISVRATDQSPGQSLSSLTTVTITVLDINDNPPVFERRDYLVTVPEDTSPGTQVLAVFATSKDIGTNAEITYLIRSGNEQGKFKINPKTGGISVSEVLDYELCKRFYLVVEAKDGGTPALSAVATVNINLTDVNDNPPKFSQDVYSAVISEDALVGDSVILLIAEDVDSQPNGQIHFSIVNGDRDNEFTVDPVLGLVKVKKKLDRERVSGYSLLVQAVDSGIPAMSSTATVNIDISDVNDNSPVFTPANYTAVIQENKPVGTSILQLVVTDRDSFHNGPPFSFSILSGNEEEEFVLDPHGILRSAVVFQHTESLEYVLCVQAKDSGKPQQVSHTYIRVRVIEESTHKPTAIPLEIFIVTMEDDFPGGVIGKIHATDQDMYDVLTFALKSEQKSLFKVNSHDGKIIALGGLDSGKYVLNVSVSDGRFQVPIDVVVHVEQLVHEMLQNTVTIRFENVSPEDFVGLHMHGFRRTLRNAVLTQKQDSLRIISIQPVAGTNQLDMLFAVEMHSSEFYKPAYLIQKLSNARRHLENIMRISAILEKNCSGLDCQEQHCEQGLSLDSHALMTYSTARISFVCPRFYRNVRCTCNGGLCPGSNDPCVEKPCPGDMQCVGYEASRRPFLCQCPPGKLGECSGHTSLSFAGNSYIKYRLSENSKEEDFKLALRLRTLQSNGIIMYTRANPCIILKIVDGKLWFQLDCGSGPGILGISGRAVNDGSWHSVFLELNRNFTSLSLDDSYVERRRAPLYFQTLSTESSIYFGALVQADNIRSLTDTRVTQVLSGFQGCLDSVILNNNELPLQNKRSSFAEVVGLTELKLGCVLYPDACKRSPCQHGGSCTGLPSGGYQCTCLSQFTGRNCESEITACFPNPCRNGGSCDPIGNTFICNCKAGLTGVTCEEDINECEREECENGGSCVNVFGSFLCNCTPGYVGQYCGLRPVVVPNIQAGHSYVGKEELIGIAVVLFVIFILVVLFIVFRKKVFRKNYSRNNITLVQDPATAALLNKSNGIPFRNLRGSGDGRNVYQEVGPPQVPVRPMAYTPCFQSDSRSNLDKIVDGLGGEHQEMTTFHPESPRILTARRGVVVCSVAPNLPAVSPCRSDCDSIRKNGWDAGTENKGVDDPGEVTCFAGSNKGSNSEVQSLSSFQSDSGDDNASIVTVIQLVNNVVDTIENEVSVMDQGQNYNRAYHWDTSDWMPGARLSDIEEVPNYENQDGGSAHQGSTRELESDYYLGGYDIDSEYPPPHEEEFLSQDQLPPPLPEDFPDQYEALPPSQPVSLASTLSPDCRRRPQFHPSQYLPPHPFPNETDLVGPPASCEFSTFAVSMNQGTEPTGPADSVSLSLHNSRGTSSSDVSANCGFDDSEVAMSDYESVGELSLASLHIPFVETQHQTQV

SEQ ID NO: 199 - DNA, 13767 bp, Homo sapiens
  CDS (1)...(13767)
atggatataattatgggacactgtgtgggcacacggcctcctgcttgttgcctcatcctcctgcttttcaagcttttggccactgtctcccaggggctgccagggactggacccctgggcttccacttcacacattccatttataatgctaccgtgtatgagaactcagcagcaaggacctacgtcaacagccagagtagaatgggcatcaccttaatagatctatcctgggatatcaaatacagaatagtgtccggagacgaggaaggctttttcaaagcagaggaagtcatcattgcagatttctgttttctcagaataagaactaaaggtggcaattctgccatattaaatagggaaatccaggataattatttattgatagtaaaaggttctgtcagaggagaggatttggaagcatggaccaaagtgaatatacaggttttagatatgaatgatctgagacctttgttttcacccacaacatactctgttaccatagcagaaagcacacctctaaggactagtgttgcccaggtgactgcaacagacgcagatattggttccaatggagaattctactactactttaaaaataaagttgatctcttttcagttcaccccacgagtggtgtcatctccttaagtggtcgattaaattatgatgaaaagaataggtatgatctggaaattttggctgtggaccggggaatgaaactgtatgggaacaatggagtgagcagtactgcaaagctttatgttcacattgagcgcataaatgaacatgccccaacaatccatgtagtcactcatgttcctttctcgttggaaaaagagccaacatatgcagtggtgacagttgatgacttagatgatggagcgaatggagagatcgaatctgtttccattgtggctggggatcctttagatcagttcttcctggctaaggaaggaaagtggttgaatgagtacaagattaaggagaggaagcagattgactgggagagctttccctatggctacaatctcactcttcaagcaaaagacaagggatctcctcaaaaatgttcagcattaaaggcagtctacattggcaaccccacaagagacactgtccccattagatttgaaaaagaagtgtacgatgtgagcataagtgaattttcccctcctggtgtcgtggttgctatagtaaaattaagtcctgaaccgatagatgtggaatacaaattatctcctggtgaggatgcagtgtactttaaaattaatcctcggtcgggtctgattgttacagcacggccactgaatactgttaagaaggaggtttataaactggaggtgacaaacaaggaaggagatttaaaagcacaggtcaccatcagcatagaagatgcaaatgaccacaccccagaatttcagcaaccactgtatgatgcttatgtgaatgaaagtgtcccagtgggaaccagcgttctaacagtttcagcttctgataaggataaaggagaaaatgggtacatcacctatagtatcgctagcctgaatttgttaccatttgtcattaatcagtttacaggtgttattagcacaactgaagaactggattttgaatcctccccagaaatttacagattcattgttagagcctctgactggggttcaccataccgccatgaaagtgaggtcaatgtgactattcgaataggaaatgtcaacgacaacagccctctctttgaaaaagtggcttgccagggagttatttcatatgactttccagttggtggtcacatcacagcagtctcagcgatcgatatcgatgaacttgaacttgtaaagtacaaaatcatttctggaaatgaacttggcttcttttatttaaacccagattctggtgttttacagcttaaaaaatcactgacaaattctggcattaaaaatggcaattttgccctcagaattacagcaactgatggagagaatcttgcagaccccatgtctattaacatttcagtcctacatgggaaagtgtcttcaaagagcttcagttgcagagaaactcgtgtggctcaaaagctggcagagaaactactcattaaggcaaaagcaaatgggaaactgaatctggaagatggatttcttgacttttattcaattaatagacagggaccatattttgacaagtcttttccttctgatgtggctgtaaaggaggatctgccagttggtgctaacattctgaagattaaagcctatgatgccgactctggcttcaatggaaaagtgctatttacaatatcagatggaaatacggatagttgctttaatattgatatggagactgggcagcttaaagtccttatgcccatggatcgagaacacacagacctctatctccttaatatcaccatctatgacttaggtaatccacagaaatcgtcatggagactgctgaccatcaatgtggaggatgctaatgacaatagcccagtttttattcaagacagttactcagttaacattcttgaaagttcaggcattggtactgaaatcattcaagtggaagccagagacaaagacttaggttctaatggtgaagtgacttactcagtcttgacagatacacagcagtttgccatcaatagctcaactggaatcgtttatgtagccgaccagttggaccgggaatccaaagccaattattctttgaaaatagaagccagggacaaggcagagagtggtcagcagctgttttcagttgtcactcttaaagtttttttagatgatgtcaatgactgctccccagctttcattcccagtagctatagtgtgaaggttcttgaagatctccctgttggcactgtcattgcttggcttgagacccatgatccagatcttggactggggggtcaagtgcgctattctttggtcaatgactataatgggagatttgaaatagataaagcaagtggtgccatccgcttgagcaaagagcttgattatgagaaacagcagttctataaccttactgtgcgggccaaagacaaagggcggcctgtctctctgtcatctgtttcctttgttgaggtggaagtggtggatgtcaatgaaaacctccacactccctatttcccagactttgctgttgttggatctgtaaaggaaaactcacgcattggaacaagcgtgctgcaggtgactgctcgagatgaagactccggaagggatggagagatccagtactccatcagggatggcagtggtcttggaaggttcagtatagacgacgagagtggggtcatcactgccgcagacattcttgatcgggagacaatggggtcatactggctaacagtgtatgccacagacaggggcgttgttccactctactccaccattgaggtctacattgaagttgaagatgtgaatgacaatgccccgctgacctcagaacctatatattatcctgttgtcatggaaaactctccaaaggacgtatctgtcattcagatccaggctgaagatcctgactccagttccaatgaaaaactgacatacaggattacaagtggaaatcctcagaatttttttgccatcaatatcaaaacaggtctgattacaacaacttcaaggaaattggatcgagaacagcaggcagaacattttctggaggtgactgtgacagatggtggtccctctccaaaacagtcaaccatttgggtggtggttcaggttctagatgaaaatgacaacaagccccagttcccagagaaggtctaccagatcaagctgccagaacgtgaccgaaagaagagaggagaaccgatttacagggcttttgcatttgatagagatgagggccccaacgcagaaatctcctacagtattgtggatgggaatgatgacggaaagttctttattgaccctaaaactgggatggtttcttctagaaagcagtttacagcaggcagttatgacatcctaacgataaaggcagtggacaatgggcgcccacagaaatcctccacggcccgcctccacattgaatggattaagaaaccacccccttcacctataccattgaccttcgatgagccgttttataacttcacagtcatggaaagtgatagagtgactgaaattgtaggggtggtgtctgtgcagccagctaacacccctctgtggtttgacatagttggggggaattttgacagcgcttttgatgcagagaagggtgttgggacaattgtcatcgcaaaacctttggatgcagagcagaggtccatctataatatgagtgtggaagtcaccgatgggacaaatgttgctgttactcaggtatttatcaaagtgctggataataatgataatggcccagaattctctcagccgaattacgatgtgacaatttccgaggatgtgcttccagacacggagatcctgcagattgaagccacagatagagatgagaagcacaagctgagctacactgttcatagcagcatcgactccatcagcatgagaaaattccggattgaccctagcactggcgtgctctatactgccgagaggctggaccatgaggcccaggacaagcacattctcaacataatggtcagagatcaggagtttccttatcgaagaaacttggcccgagtcattgtgaatgtggaggatgctaatgatcacagtccttattttaccaacccactgtatgaagcgtctgtgtttgaatctgctgctctgggatcagctgttctgcaagtgacggctctggacaaagacaaaggagaaaatgcagaactcatatataccatagaagcagggaacactgggaacatgtttaagatcgaaccggtcctaggcatcatcaccatttgcaaagaaccagacatgacgacgatgggtcagtttgtcctatccatcaaagtcacagatcagggatccccgccaatgtctgctactgcaattgtgcgcatttccgtcaccatgtctgacaattctcaccccaagttcattcacaaagactaccaagcagaagtaaatgaaaatgttgacattggaacatcagtcattctaatctctgccatcagtcaatctaccctcatttatgaagtcaaagatggagacattaatgggatctttaccataaatccatattctggagtcatcaccactcagaaggccctggattatgagcgcacatcctcttatcaactcatcattcaggccaccaatatggcaggaatggcttccaatgctacagtcaatattcagattgttgatgaaaatgataatgccccagtttttctcttttctcaatactcaggcagcctaagtgaggctgccccaattaatagcattgtcaggagcttggataacagcccactggtgattcgagccacagatgctgacagcaaccggaatgctctgcttgtgtatcagattgtggagtcaacagcaaaaaagtttttcacggtggactccagtacaggtgcaatcagaacaattgccaacctggaccatgaaaccattgcccatttccattttcatgtgcatgtgagagacagtggtagcccccaactgactgcagagagtcccgttgaagtcaacattgaggtgacagatgtgaatgataacccacctgtttttactcaggctgtgtttgagactatcttacttctacctacctatgttggagtggaggttctgaaagttagtgccacagatcctgactctgaggtaccccctgaactgacatacagcctaatggaaggcagtttggatcattttttaattgactcaaacagtggagtacttaccataaaaaacaacaacctctccaaggatcactacatgctgatagttaaggtgtctgatggaaagttctacagtacctccatggtcaccatcatggttaaagaagccatggacagcggcctccactttacacaaagcttctattccacctcaatctcagagaacaacactaacataaccaaagttgctattgtcaatgcagttggaaatcgccttaatgagcccttaaaatacagcatcttaaacccaggaaataagttcaagataaaatctacctcaggggtcattcagacgactggagtcccctttgaccgtgaagaacaagagttatatgagctggtggtagaagccagccgtgagctggaccatctgcgtgtggccagagtggtggtcagggttaacattgaagacataaatgacaattctccagtctttgtgggcctcccatactatgctgctgttcaagtggatgcggaacccgggactctgatttatcaggtgacagccattgacaaagataaaggtccaaatggagaagtgacctatgtcctgcaggatgactatggccactttgaaattaaccctaattcagggaatgttattttaaaggaagcattcaactctgacttgtccaacattgagtatggagtcaccatcctagccaaggatggcggaaaaccttctttgtctacatctgtggagcttcccatcactattgtcaacaaagcaatgcctgtgtttgataagcccttttatacagcatctgtcaatgaagacatcagaatgaacacacccatcctaagcatcaatgccaccagtccagaaggccaaggcatcatatatatcattatcgatggggacccttttaaacagtttaacattgactttgacactggggtcctgaaagttgttagccctttggattatgaagttacatctgcttacaagctgacaataagagccagcgacgcccttactggtgctagggctgaagtcactgttgacttgctagttaatgatgtaaatgacaacccccctattttcgatcagcctacatacaatacaacactatcagaagcatctcttattgggacacctgttttacaagttgtctctattgatgcagactcagaaaacaataaaatggtacattatcagattgtccaggatacctacaatagcacagattattttcacatagatagctcaagtggcttaatcctgacagcacgaatgctggaccatgagttagtacaacactgcactttgaaagtcagatcaatagatagtggcttcccatcactgagcagtgaggttctcgttcatatctacatctctgatgtaaatgacaaccctccagtttttaatcagctcatttatgagtcatatgtgagtgaattagccccccggggccattttgtaacctgtgtacaagcctctgatgcagacagctctgattttgaccggttggaatatagcattttatctgggaatgaccggacgagctttctgatggacagcaagagtggagttatcacattgtccaaccatcggaagcagcggatggagcctctgtacagtctcaatgtgtctgtctctgatgggttgttcaccagcactgcacaggtgcatattagggtacttggggctaacttgtacagccctgccttttcacaaagcacatacgtagctgaggtgagagagaacgtggctgcaggaacaaaggtaattcatgttcgagccacagatggtgatccagggacttatgggcagatcagctatgccatcatcaatgactttgccaaggatcgattcctcatagacagcaatgggcaggtcatcaccacagaaaggctagaccgggaaaaccctctagaaggggatgttagtatttttgtgagggcccttgatggtggagggagaacaactttctgcactgtgagagtgattgttgtggatgaaaatgacaatgctccccagttcatgacagtggaatatagagccagtgtcagggcagatgttggaaggggccacttggtcactcaagttcaagccatagatcccgatgatggagcaaattcaaggattacttattccctctatagcgaggcctctgtttcagtggccgacctcctggaaatcgatcctgacaatggctggatggtcacaaagggtaattttaaccagctgaaaaatacagtgctttcgttctttgtcaaagcagtagatgggggcatcccagtaaagcactccctcattcctgtctatatccacgtcttgccccctgaaacgttcttgccatcattcacccagtctcagtattcctttaccattgcagaagatacagccattgggagtacagtggacaccctgaggattttgcccagtcagaatgtctggttcagcacagttaatggggaacggccagaaaataacaaagggggcgtattcgtcatagaacaggaaacaggcactattaagcttgacaaacgccttgaccgtgaaaccagcccagctttccactttaaagtagcagccactatacccctggacaaagtagacattgtgtttactgtggatgtagatatcaaggtattggatttgaatgacaacaagccagtctttgaaacttcaagctatgacaccattataatggaagggatgcctgttggcaccaaactcacacaagtgagagctattgatatggactggggagccaatggacaagtcacttactccctccactcggattcccagcccgaaaaggtaatggaagcattcaatattgacagcaacacgggctggatcagtaccttgaaggacctagatcacgagacagaccccacattcaccttctctgtggtggcctctgaccttggagaggcattctctctttcctccacggccttggtctctgtcagagtgacagatataaatgacaatgcaccagtcttcgcgcaggaagtgtaccgagggaatgtgaaggagagcgacccaccgggcgaggtggtagccgtcctcagcacctgggacagagacacatccgacgttaatcgccaagtgagctaccatattacaggaggaaaccctcgaggaaggtttgctctgggcctggtgcaaagtgagtggaaggtctatgtgaagaggcctctagacagagaagaacaggacatttactttctcaatatcactgccactgatgggctttttgtcacacaggccatggtggaagtgagcgtcagtgatgtgaatgacaatagcccagtgtgtgatcaggttgcatatacagcattacttcctgaagacattccatcaaataaaatcatcctgaaagtcagtgcaaaggatgctgatattggatccaatggatatatacgatactcactctatggatctggaaacagtgaattttttctagatccagaaagtggcgagttaaaaaccttggctctgttggaccgggagaggatccccgtgtacagcctgatggccaaggccactgacgggggtggcaggttctgccagtccaacatccacctaatcctggaggatgtgaatgataacccccctgtgttttcttctgaccactacaacacctgtgtctatgagaacacagccaccaaggctctgttgaccagagttcaagccgtggaccccgacattggcatcaataggaaggtcgtgtactccctggcagactcagctggtggggtcttctccattgacagctcatctggcatcatcatcctggagcagccactggaccgtgagcagcagtcttcgtacaacatcagcgtgcgggccactgaccagagtcctggacagtccctgtcctctctcactactgtcaccatcaccgttctggacattaatgacaacccccctgtgtttgagaggagggactacctggtgacggtgcctgaggacacctcccctggcacccaagtccttgctgtttttgccaccagcaaagatattggcacaaatgctgagatcacttatctcatccggtctgggaacgaacaagggaaatttaagatcaaccccaagacagggggtatttctgtctctgaagtcctggactatgaattatgcaaaaggttttacctggtagtggaagccaaagatgggggcaccccagctctcagcgctgtggccactgtcaacatcaacctcacagatgttaatgacaaccctcccaagttcagccaagacgtctacagtgcggttatcagtgaagacgccttggtgggagactctgtcattttgctaatagcagaagatgtagacagccagcccaacggacagattcatttttccattgtgaatggagatcgggacaatgaatttactgtagatcctgtcttgggacttgtgaaagttaagaagaaattggaccgggaacgggtgtctggatactctctgcttgtccaggccgtagacagtggcattcctgcaatgtcatcaactgcaactgtcaacattgatatttctgatgtgaatgacaacagcccggtgtttacacctgccaactatactgctgtgattcaggaaaataagccagtgggcaccagcatcttgcagctggtggtgacagacagagactcctttcacaatgggcctcccttttcattctctattttgtcgggaaatgaagaggaggagtttgtgttggaccctcatgggatcttgcggtcggctgtggtcttccagcacacagagtctctggaatacgtgttgtgtgtccaggcaaaggattcaggcaaaccccagcaagtttctcacacttacatccgcgtgcgagtcattgaggaaagcacccacaagcccacagccattcccctggaaattttcattgtcaccatggaggatgactttcctggtggggtcattgggaagattcatgccacagatcaagacatgtatgatgtgctcacatttgccctgaaatcggagcagaaaagcttatttaaagtgaacagtcacgatgggaaaatcatcgccctgggaggcctggacagcggcaagtatgtcctgaatgtgtctgtgagtgatggtcgcttccaggtacccattgatgtggtcgtgcatgtggagcagttggtgcatgagatgctgcagaacactgtcaccatccgctttgaaaatgtgtcccctgaggacttcgtggggctgcacatgcatgggttccggcgcaccctgcggaatgcagtcctcacccagaagcaggacagcctgcgcatcatcagcatccagcccgtggcaggcaccaaccaactggacatgctgtttgcggtggagatgcacagcagcgagttctacaagccagcctacctgatccagaagctgtccaatgctagaagacacctggagaatatcatgcgcatctcagccatcttggagaagaactgctcagggctggactgtcaggaacagcattgtgagcaaggcttgtcactcgattcccacgcgctcatgacctacagcacggctcgcatcagctttgtgtgtccgcgtttctacaggaacgtgcgttgcacctgcaatggaggactgtgtccggggtccaacgatccttgtgtggagaagccgtgtccaggggacatgcagtgtgtcggttatgaagccagcaggagaccgttcctctgccagtgtccaccagggaagctcggagagtgctcagggcacacttctctcagctttgctggaaacagttacatcaaatatcggctttctgaaaatagcaaagaagaggatttcaaactagctctgcgtcttcgaacactgcaaagcaatgggattataatgtacaccagagcaaatccctgcataattctgaagattgtggatggcaagctgtggttccagctggactgcggcagcggccctggaatcttgggcatctcgggccgtgctgtcaacgacgggagctggcactcggtcttcctggagctcaaccgcaatttcacgagcctgtccctggatgacagctacgtggagcggcgccgggcgcccctctacttccagacgctgagcactgagagtagcatctacttcggcgccctggtgcaagcggataacatccgcagcctgactgacacgcgggtcacgcaggtgctcagcggcttccagggctgcctggactcggtgatactgaataacaatgagctgccgctgcagaacaagcgcagcagcttcgcggaggtggtgggcctgacggagctgaagctgggctgcgtgctctatcccgacgcctgcaagcgcagcccgtgccagcacgggggcagctgcactggcctgccatcggggggctatcagtgtacctgtctctcacagtttacggggagaaactgtgaatctgagattacagcctgcttcccaaacccctgccggaatggaggatcctgcgatccaataggaaacactttcatctgcaattgtaaagctgggctcactggagtcacgtgtgaggaggacatcaatgagtgcgaacgagaggagtgtgagaacggaggctcctgcgtgaacgtgttcggctccttcctctgcaactgcacgccgggctacgtgggccagtactgcgggcgccccgtggtggtacccaatatccaggctggccactcctacgtggggaaggaggagctcatcggcatcgccgtggtcctcttcgtcatcttcatcctggtggttctcttcatagtcttccgcaagaaggtcttccgcaagaactactcccgcaacaacatcacgctagtgcaggacccggccaccgccgccctgcttaacaagagcaatggcatcccgttccggaacctgcgcggcagtggggacggccgcaacgtctaccaggaggtggggcccccgcaggtccccgtgcgccccatggcctacacaccctgcttccagagtgactccaggagcaacctggataagatcgtggacgggctgggaggcgagcaccaggaaatgaccacgtttcaccctgagtcgccccgcatcctgacagcccggcggggcgtggtcgtgtgcagtgtggcccccaacctccccgccgtgtcaccctgccgctccgactgcgactccatccggaagaatggctgggacgcgggaactgagaacaaaggggttgatgacccgggagaagtgacctgctttgcaggtagtaataaaggcagcaactctgaagttcagtccctcagctccttccagtcagattctggtgacgacaatgcctccatagtgactgtcattcagcttgtcaacaatgtagttgacactatagagaatgaagtgtctgtcatggaccaaggacagaactacaaccgagcctatcactgggacacctctgattggatgccaggggcccgcctgtcggacatagaggaagtgcccaactatgagaaccaggatggagggtctgcacaccaggggagcacacgggagctggagagcgattactacctgggtggttatgacattgacagtgaatacccaccccctcatgaagaggagttcttgagtcaggaccagctgcctcctcctctcccggaggacttcccagaccaatatgaggccctgccaccctcccagcctgtctccctggccagcacactgagcccagactgcaggagaaggccccagtttcatcctagccagtatctccctcctcacccattccccaacgaaacggatttggtgggcccgcctgccagctgtgaatttagtacttttgctgtgagcatgaaccagggcacagagcccacaggcccagcagacagcgtgtctctgtccttgcacaattccagaggcacctcatcctcggatgtgtctgccaactgcggctttgacgattccgaagtagccatgagtgactacgagagcgtgggagagctcagcctcgccagccttcacattccctttgtggagactcagcatcagactcaagtgtag

SEQ ID NO: 200 - protein, 4588 aa, Homo sapiens
MDIIMGHCVGTRPPACCLILLLFKLLATVSQGLPGTGPLGFHFTHSIYNATVYENSAARTYVNSQSRMGITLIDLSWDIKYRIVSGDEEGFFKAEEVIIADFCFLRIRTKGGNSAILNREIQDNYLLIVKGSVRGEDLEAWTKVNIQVLDMNDLRPLFSPTTYSVTIAESTPLRTSVAQVTATDADIGSNGEFYYYFKNKVDLFSVHPTSGVISLSGRLNYDEKNRYDLEILAVDRGMKLYGNNGVSSTAKLYVHIERINEHAPTIHVVTHVPFSLEKEPTYAVVTVDDLDDGANGEIESVSIVAGDPLDQFFLAKEGKWLNEYKIKERKQIDWESFPYGYNLTLQAKDKGSPQKCSALKAVYIGNPTRDTVPIRFEKEVYDVSISEFSPPGVVVAIVKLSPEPIDVEYKLSPGEDAVYFKINPRSGLIVTARPLNTVKKEVYKLEVTNKEGDLKAQVTISIEDANDHTPEFQQPLYDAYVNESVPVGTSVLTVSASDKDKGENGYITYSIASLNLLPFVINQFTGVISTTEELDFESSPEIYRFIVRASDWGSPYRHESEVNVTIRIGNVNDNSPLFEKVACQGVISYDFPVGGHITAVSAIDIDELELVKYKIISGNELGFFYLNPDSGVLQLKKSLTNSGIKNGNFALRITATDGENLADPMSINISVLHGKVSSKSFSCRETRVAQKLAEKLLIKAKANGKLNLEDGFLDFYSINRQGPYFDKSFPSDVAVKEDLPVGANILKIKAYDADSGFNGKVLFTISDGNTDSCFNIDMETGQLKVLMPMDREHTDLYLLNITIYDLGNPQKSSWRLLTINVEDANDNSPVFIQDSYSVNILESSGIGTEIIQVEARDKDLGSNGEVTYSVLTDTQQFAINSSTGIVYVADQLDRESKANYSLKIEARDKAESGQQLFSVVTLKVFLDDVNDCSPAFIPSSYSVKVLEDLPVGTVIAWLETHDPDLGLGGQVRYSLVNDYNGRFEIDKASGAIRLSKELDYEKQQFYNLTVRAKDKGRPVSLSSVSFVEVEVVDVNENLHTPYFPDFAVVGSVKENSRIGTSVLQVTARDEDSGRDGEIQYSIRDGSGLGRFSIDDESGVITAADILDRETMGSYWLTVYATDRGVVPLYSTIEVYIEVEDVNDNAPLTSEPIYYPVVMENSPKDVSVIQIQAEDPDSSSNEKLTYRITSGNPQNFFAINIKTGLITTTSRKLDREQQAEHFLEVTVTDGGPSPKQSTIWVVVQVLDENDNKPQFPEKVYQIKLPERDRKKRGEPIYRAFAFDRDEGPNAEISYSIVDGNDDGKFFIDPKTGMVSSRKQFTAGSYDILTIKAVDNGRPQKSSTARLHIEWIKKPPPSPIPLTFDEPFYNFTVMESDRVTEIVGVVSVQPANTPLWFDIVGGNFDSAFDAEKGVGTIVIAKPLDAEQRSIYNMSVEVTDGTNVAVTQVFIKVLDNNDNGPEFSQPNYDVTISEDVLPDTEILQIEATDRDEKHKLSYTVHSSIDSISMRKFRIDPSTGVLYTAERLDHEAQDKHILNIMVRDQEFPYRRNLARVIVNVEDANDHSPYFTNPLYEASVFESAALGSAVLQVTALDKDKGENAELIYTIEAGNTGNMFKIEPVLGIITICKEPDMTTMGQFVLSIKVTDQGSPPMSATAIVRISVTMSDNSHPKFIHKDYQAEVNENVDIGTSVILISAISQSTLIYEVKDGDINGIFTINPYSGVITTQKALDYERTSSYQLIIQATNMAGMASNATVNIQIVDENDNAPVFLFSQYSGSLSEAAPINSIVRSLDNSPLVIRATDADSNRNALLVYQIVESTAKKFFTVDSSTGAIRTIANLDHETIAHFHFHVHVRDSGSPQLTAESPVEVNIEVTDVNDNPPVFTQAVFETILLLPTYVGVEVLKVSATDPDSEVPPELTYSLMEGSLDHFLIDSNSGVLTIKNNNLSKDHYMLIVKVSDGKFYSTSMVTIMVKEAMDSGLHFTQSFYSTSISENNTNITKVAIVNAVGNRLNEPLKYSILNPGNKFKIKSTSGVIQTTGVPFDREEQELYELVVEASRELDHLRVARVVVRVNIEDINDNSPVFVGLPYYAAVQVDAEPGTLIYQVTAIDKDKGPNGEVTYVLQDDYGHFEINPNSGNVILKEAFNSDLSNIEYGVTILAKDGGKPSLSTSVELPITIVNKAMPVFDKPFYTASVNEDIRMNTPILSINATSPEGQGIIYIIIDGDPFKQFNIDFDTGVLKVVSPLDYEVTSAYKLTIRASDALTGARAEVTVDLLVNDVNDNPPIFDQPTYNTTLSEASLIGTPVLQVVSIDADSENNKMVHYQIVQDTYNSTDYFHIDSSSGLILTARMLDHELVQHCTLKVRSIDSGFPSLSSEVLVHIYISDVNDNPPVFNQLIYESYVSELAPRGHFVTCVQASDADSSDFDRLEYSILSGNDRTSFLMDSKSGVITLSNHRKQRMEPLYSLNVSVSDGLFTSTAQVHIRVLGANLYSPAFSQSTYVAEVRENVAAGTKVIHVRATDGDPGTYGQISYAIINDFAKDRFLIDSNGQVITTERLDRENPLEGDVSIFVRALDGGGRTTFCTVRVIVVDENDNAPQFMTVEYRASVRADVGRGHLVTQVQAIDPDDGANSRITYSLYSEASVSVADLLEIDPDNGWMVTKGNFNQLKNTVLSFFVKAVDGGIPVKHSLIPVYIHVLPPETFLPSFTQSQYSFTIAEDTAIGSTVDTLRILPSQNVWFSTVNGERPENNKGGVFVIEQETGTIKLDKRLDRETSPAFHFKVAATIPLDKVDIVFTVDVDIKVLDLNDNKPVFETSSYDTIIMEGMPVGTKLTQVRAIDMDWGANGQVTYSLHSDSQPEKVMEAFNIDSNTGWISTLKDLDHETDPTFTFSVVASDLGEAFSLSSTALVSVRVTDINDNAPVFAQEVYRGNVKESDPPGEVVAVLSTWDRDTSDVNRQVSYHITGGNPRGRFALGLVQSEWKVYVKRPLDREEQDIYFLNITATDGLFVTQAMVEVSVSDVNDNSPVCDQVAYTALLPEDIPSNKIILKVSAKDADIGSNGYIRYSLYGSGNSEFFLDPESGELKTLALLDRERIPVYSLMAKATDGGGRFCQSNIHLILEDVNDNPPVFSSDHYNTCVYENTATKALLTRVQAVDPDIGINRKVVYSLADSAGGVFSIDSSSGIIILEQPLDREQQSSYNISVRATDQSPGQSLSSLTTVTITVLDINDNPPVFERRDYLVTVPEDTSPGTQVLAVFATSKDIGTNAEITYLIRSGNEQGKFKINPKTGGISVSEVLDYELCKRFYLVVEAKDGGTPALSAVATVNINLTDVNDNPPKFSQDVYSAVISEDALVGDSVILLIAEDVDSQPNGQIHFSIVNGDRDNEFTVDPVLGLVKVKKKLDRERVSGYSLLVQAVDSGIPAMSSTATVNIDISDVNDNSPVFTPANYTAVIQENKPVGTSILQLVVTDRDSFHNGPPFSFSILSGNEEEEFVLDPHGILRSAVVFQHTESLEYVLCVQAKDSGKPQQVSHTYIRVRVIEESTHKPTAIPLEIFIVTMEDDFPGGVIGKIHATDQDMYDVLTFALKSEQKSLFKVNSHDGKIIALGGLDSGKYVLNVSVSDGRFQVPIDVVVHVEQLVHEMLQNTVTIRFENVSPEDFVGLHMHGFRRTLRNAVLTQKQDSLRIISIQPVAGTNQLDMLFAVEMHSSEFYKPAYLIQKLSNARRHLENIMRISAILEKNCSGLDCQEQHCEQGLSLDSHALMTYSTARISFVCPRFYRNVRCTCNGGLCPGSNDPCVEKPCPGDMQCVGYEASRRPFLCQCPPGKLGECSGHTSLSFAGNSYIKYRLSENSKEEDFKLALRLRTLQSNGIIMYTRANPCIILKIVDGKLWFQLDCGSGPGILGISGRAVNDGSWHSVFLELNRNFTSLSLDDSYVERRRAPLYFQTLSTESSIYFGALVQADNIRSLTDTRVTQVLSGFQGCLDSVILNNNELPLQNKRSSFAEVVGLTELKLGCVLYPDACKRSPCQHGGSCTGLPSGGYQCTCLSQFTGRNCESEITACFPNPCRNGGSCDPIGNTFICNCKAGLTGVTCEEDINECEREECENGGSCVNVFGSFLCNCTPGYVGQYCGRPVVVPNIQAGHSYVGKEELIGIAVVLFVIFILVVLFIVFRKKVFRKNYSRNNITLVQDPATAALLNKSNGIPFRNLRGSGDGRNVYQEVGPPQVPVRPMAYTPCFQSDSRSNLDKIVDGLGGEHQEMTTFHPESPRILTARRGVVVCSVAPNLPAVSPCRSDCDSIRKNGWDAGTENKGVDDPGEVTCFAGSNKGSNSEVQSLSSFQSDSGDDNASIVTVIQLVNNVVDTIENEVSVMDQGQNYNRAYHWDTSDWMPGARLSDIEEVPNYENQDGGSAHQGSTRELESDYYLGGYDIDSEYPPPHEEEFLSQDQLPPPLPEDFPDQYEALPPSQPVSLASTLSPDCRRRPQFHPSQYLPPHPFPNETDLVGPPASCEFSTFAVSMNQGTEPTGPADSVSLSLHNSRGTSSSDVSANCGFDDSEVAMSDYESVGELSLASLHIPFVETQHQTQV

SEQ ID NO: 201 - DNA, 288 bp, Homo sapiens
  CDS (1)...(288)
atggaggtggtgctgatctttctatgcagcctgttggcccacattgtcctggccgatgcagttgagagggagaagcaaattgacccttttcattatgactaccagaccctgaggattagggggttggtatgtgctgtggtcctcttctccattgggatcctccttatcctaggttgcagatgcaagtgcagtttcaatcagaagcccaggaccccaggagaggaggaagcccaggtggagaacctcatcactgcaaatgcaacaaagctccagaaagcagagagctga

SEQ ID NO: 202 - protein, 95 aa, Homo sapiens [sequence omitted]

SEQ ID NO: 203 - DNA, 808 bp, Homo sapiens
cagactgggtctcattctgtctcccaggctggagtgcagtggcatgatctcgggtcactgcaactgccgcctccaagattcaagtgattctcctgcctcagcctccccagtagctgggattacaggcacatgccaccatgtctggctaatttttcatattttcagtagagacaagttttcaccatattgaccaggctggtctcgaattcctgacctcaagtgatccacccgcctcagcctcccaaagtgctgggattacaggtgtgagccacctcacccagcctccattatttctttaatggttcaggttccattatgccatggattatttcagtaacattgtttgctctttcaatttgtataatcctatccctaaagagattgaaaactatgaacatgccactcccagcctccttgggacttgacacatcctcctgggatcatctcagatgggactgactgtgccggcaccatggaggtggtgctgatctttctatgcagcctgttggcccacattgtcctggccgatgcagttgagagggagaagcaaattgacccttttcattatgactaccagaccctgaggattagggggttggtatgtgctgtggtcctcttctccattgggatcctccttatcctaggttgcagatgcaagtgcagtttcaatcagaagcccaggaccccaggagaggaggaagcccaggtggagaacctcatcactgcaaatgcaacaaagctccagaaagcagagagctgaatgaagtgcagccttccagtgggaagcctctggaacctgaaggccagc

SEQ ID NO: 204 - DNA, 1515 bp, Homo sapiens
  CDS (1)...(1515)
atgacctggttggtgctgctggggacactgctctgcatgctgcgcgttgggttaggcaccccggactccgagggtttcccgccccgtgcgctccacaactgcccctacaaatgtatctgcgctgccgacctgctaagctgcactggcctagggctgcaggacgtgccagccgagttacctgccgctactgcggacctcgacctgagccacaacgcgctccagcgcctgcgccccggctggttggcgcccctcttccagctgcgcgccctgcacctagaccacaacgaactagatgcgctgggtcgcggcgtcttcgtcaacgccagcggcctgaggctgctcgatctatcatctaacacgttgcgggcgcttggccgccacgacctcgacgggctgggggcgctggagaagctgcttctgttcaataaccgcttggtgcacttggacgagcatgccttccacggcctgcgcgcgctcagccatctctacctgggctgcaacgaactcgcctcgttctccttcgaccacctgcacggtctgagcgccacccacctgcttactctggacctctcctccaaccggctgggacacatctccgtacctgagctggccgcgctgccggccttcctcaagaacggcctctacttgcacaacaaccctttgccttgcgactgccgcctctaccacctgctacagcgctggcaccagcggggcctgagcgccgtgcgcgactttgcgcgcgagtacgtatgcttggccttcaaggtacccgcgtcccgcgtgcgcttcttccagcacagccgcgtctttgagaactgctcgtcggccccagctcttggcctagagcggccggaagagcacctgtacgcgctggtgggtcggtccctgaggctttactgcaacaccagcgtcccggccatgcgcattgcctgggtttcgccgcagcaggagcttctcagggcgccaggatcccgcgatggcagcatcgcggtgctggccgacggcagcttggccataggcaacgtacaggagcagcatgcgggactcttcgtgtgcctggccactgggccccgcctgcaccacaaccagacgcacgagtacaacgtgagcgtgcactttccgcgcccagagcccgaggctttcaacacaggcttcaccacactgctgggctgtgccgtgggccttgtgctcgtgctgctctacctgttcgccccaccctgccgctgctgccgccgtgcctgccgctgccgccgctggccccaaacacccagcccgctccaagagctgagcgcacagtcctcagtactcagcaccacaccgccagacgcacccagccgcaaggccagcgtccacaagcacgtagtctttctggagccaggccggaggggcctcaatggccgcgtgcagctggcagtagctgaggaattcgatctctacaaccctggaggcctgcagctgaaggctggctctgagtccgccagctccataggctccgagggtcccatgacaacctag

SEQ ID NO: 205 - protein, 504 aa, Homo sapiens
MTWLVLLGTLLCMLRVGLGTPDSEGFPPRALHNCPYKCICAADLLSCTGLGLQDVPAELPAATADLDLSHNALQRLRPGWLAPLFQLRALHLDHNELDALGRGVFVNASGLRLLDLSSNTLRALGRHDLDGLGALEKLLLFNNRLVHLDEHAFHGLRALSHLYLGCNELASFSFDHLHGLSATHLLTLDLSSNRLGHISVPELAALPAFLKNGLYLHNNPLPCDCRLYHLLQRWHQRGLSAVRDFAREYVCLAFKVPASRVRFFQHSRVFENCSSAPALGLERPEEHLYALVGRSLRLYCNTSVPAMRIAWVSPQQELLRAPGSRDGSIAVLADGSLAIGNVQEQHAGLFVCLATGPRLHHNQTHEYNVSVHFPRPEPEAFNTGFTTLLGCAVGLVLVLLYLFAPPCRCCRRACRCRRWPQTPSPLQELSAQSSVLSTTPPDAPSRKASVHKHVVFLEPGRRGLNGRVQLAVAEEFDLYNPGGLQLKAGSESASSIGSEGPMTT

SEQ ID NO: 206 - DNA, 1281 bp, Homo sapiens
  CDS (1)...(1281)
atgtggccactgacagcccttctgctcctggttccaagcagtgggcaagctgctactctggagaagcccatattgtctctacatccaccttggaccaccatcttcaaaggggagcgggtaactttgaagtgtgatggataccacccactgctcctggagctccagcccatcagcactctctggtatttgggccacctacttctgccctctcacaagaagagcattgaggtgcagacaccaggggtgtatcgatgccagacacggggagcacccgtcagtgaccccatccacctctctgtatccaatgattggctgattctgcaagtgccctatgctccagtgttcgagggtgagccgctagtcctgcgctgccgcggctggtacgacaaggtggtctacaagcttcactactaccacgacggccaggccgtgcgctacttccactccagcgccaactacactgtgttacaggcgcgtgccagcgacagcgggcgctaccagtgctcgggcaccatgcgcatcccggtggagagcgcgcccatgttctccgctaaggtggctgtgacagtgcaagagctgttccgggcgccggtgctgagggtgatgggtccgcgggaggcccgcggcgcggcgctgggtggggtggtgctgcgctgcgacacgcgcctgcacccgcagaagcgcgacacgccgctgcagttcgcgttttacaagtacagccgcgcggtgcgccgcttcgactggggcgccgagtacacagtcccggagcccgaggtcgaggagctcgaatcgtactggtgcgaggcggctaccgccacccgcagtgtccggaaacgcagtccgtggctgcagctcccggggcccggttctcccctggacccggcctccaccaccgccccagctccatgggccgcagccttggctcctggtaataggccgctttccttcagaaagcccccggtgtccagatcggtcccgttggtcacctccgtccggaacaccacctccaccgggctgcagttcccggcgagcggcgccccgactgcggggccacccgcctgcgctccgccgacgcccttggaacaatcggctggagccctgaaacccgacgtggaccttctgctccgagaaatgcagctgctcaaaggccttctgagccgggtggtcctggaattaaaggagccacaggccctccgggagctcaggggaacgcccgagacccccacctctcactttgctgtgagcccgggaaccccagagaccactcctgtggagagctga

SEQ ID NO: 207 - protein, 426 aa, Homo sapiens
MWPLTALLLLVPSSGQAATLEKPILSLHPPWTTIFKGERVTLKCDGYHPLLLELQPISTLWYLGHLLLPSHKKSIEVQTPGVYRCQTRGAPVSDPIHLSVSNDWLILQVPYAPVFEGEPLVLRCRGWYDKVVYKLHYYHDGQAVRYFHSSANYTVLQARASDSGRYQCSGTMRIPVESAPMFSAKVAVTVQELFRAPVLRVMGPREARGAALGGVVLRCDTRLHPQKRDTPLQFAFYKYSRAVRRFDWGAEYTVPEPEVEELESYWCEAATATRSVRKRSPWLQLPGPGSPLDPASTTAPAPWAAALAPGNRPLSFRKPPVSRSVPLVTSVRNTTSTGLQFPASGAPTAGPPACAPPTPLEQSAGALKPDVDLLLREMQLLKGLLSRVVLELKEPQALRELRGTPETPTSHFAVSPGTPETTPVES

SEQ ID NO: 208 - DNA, 1389 bp, Homo sapiens
  CDS (1)...(1389)
atgtctcctagtactcagtggcatccactggccacattctttctctctgttccccatctcatgccagtgcatctccatccttctgcagctgctgcagtcagatccatcatgtggccactgacagcccttctgctcctggttccaagcagtgggcaagctgctactctggagaagcccatattgtctctacatccaccttggaccaccatcttcaaaggggagcgggtaactttgaagtgtgatggataccacccactgctcctggagctccagcccatcagcactctctggtatttgggccacctacttctgccctctcacaagaagagcattgaggtgcagacaccaggggtgtatcgatgccagacacggggagcacccgtcagtgaccccatccacctctctgtatccaatgattggctgattctgcaagtgccctatgctccagtgttcgagggtgagccgctagtcctgcgctgccgcggctggtacgacaaggtggtctacaagcttcactactaccacgacggccaggccgtgcgctacttccactccagcgccaactacactgtgttacaggcgcgtgccagcgacagcgggcgctaccagtgctcgggcaccatgcgcatcccggtggagagcgcgcccatgttctccgctaaggtggctgtgacagtgcaagagctgttccgggcgccggtgctgagggtgatgggtccgcgggaggcccgcggcgcggcgctgggtggggtggtgctgcgctgcgacacgcgcctgcacccgcagaagcgcgacacgccgctgcagttcgcgttttacaagtacagccgcgcggtgcgccgcttcgactggggcgccgagtacacagtcccggagcccgaggtcgaggagctcgaatcgtactggtgcgaggcggctaccgccacccgcagtgtccggaaacgcagtccgtggctgcagctcccggggcccggttctcccctggacccggcctccaccaccgccccagctccatgggccgcagccttggctcctggtaataggccgctttccttcagaaagcccccggtgtccagatcggtcccgttggtcacctccgtccggaacaccacctccaccgggctgcagttcccggcgagcggcgccccgactgcggggccacccgcctgcgctccgccgacgcccttggaacaatcggctggagccctgaaacccgacgtggaccttctgctccgagaaatgcagctgctcaaaggccttctgagccgggtggtcctggaattaaaggagccacaggccctccgggagctcaggggaacgcccgagacccccacctctcactttgctgtgagcccgggaaccccagagaccactcctgtggagagctga

SEQ ID NO: 209 - protein, 462 aa, Homo sapiens [sequence omitted]

SEQ ID NO: 210 - DNA, 612 bp, Homo sapiens
  CDS (1)...(612)
atgtggccactgacagcccttctgctcctggttccaagcagtgggcaagctgctactctggagaagcccatattgtctctacatccaccttggaccaccatcttcaaaggggagcgggtaactttgaagtgtgatggataccacccactgctcctggagctccagcccatcagcactctctggtatttgggccacctacttctgccctctcacaagaagagcattgaggtgcagacaccaggggtgtatcgatgccagacacggggagcacccgtcagtgaccccatccacctctctgtatccaatgattggctgattctgcaagtgccctatgctccagtgttcgagggtgagccgctagtcctgcgctgccgcggctggtacgacaaggtggtctacaagcttcactactaccacgacggccaggccgtgcgctacttccactccagcgccaactacactgtgttacaggcgcgtgccagcgacagcgggcgctaccagtgctcgggcaccatgcgcatcccggtggagagcgcgcccatgttctccgctaaggtggctgtgacagtgcaaggtgggagagaccaggggccccgggagggaggcaaatga

SEQ ID NO: 211 - protein, 203 aa, Homo sapiens [sequence omitted]

SEQ ID NO: 212 - DNA, 720 bp, Homo sapiens
  CDS (1)...(720)
atgtctcctagtactcagtggcatccactggccacattctttctctctgttccccatctcatgccagtgcatctccatccttctgcagctgctgcagtcagatccatcatgtggccactgacagcccttctgctcctggttccaagcagtgggcaagctgctactctggagaagcccatattgtctctacatccaccttggaccaccatcttcaaaggggagcgggtaactttgaagtgtgatggataccacccactgctcctggagctccagcccatcagcactctctggtatttgggccacctacttctgccctctcacaagaagagcattgaggtgcagacaccaggggtgtatcgatgccagacacggggagcacccgtcagtgaccccatccacctctctgtatccaatgattggctgattctgcaagtgccctatgctccagtgttcgagggtgagccgctagtcctgcgctgccgcggctggtacgacaaggtggtctacaagcttcactactaccacgacggccaggccgtgcgctacttccactccagcgccaactacactgtgttacaggcgcgtgccagcgacagcgggcgctaccagtgctcgggcaccatgcgcatcccggtggagagcgcgcccatgttctccgctaaggtggctgtgacagtgcaaggtgggagagaccaggggccccgggagggaggcaaatga

SEQ ID NO: 213 - protein, 239 aa, Homo sapiens [sequence omitted]

SEQ ID NO: 214 - DNA, 1965 bp, Homo sapiens
tcttcctgggagttgacagtacctgataattgatctccttcccatcagatttccaagggatcaaggtgccccggttctaaacaaccacaggtacggtcacatggctcagaaagcacaagaagtagagccccgaggtcagatctgagaggcttctgaggggccgatgcagtgacttctctgctgcagctgctgcagtcagatccatcatgtggccactgacagcccttctgctcctggttccaagcagtgggcaagctgctactctggagaagcccatattgtctctacatccaccttggaccaccatcttcaaaggggagcgggtaactttgaagtgtgatggataccacccactgctcctggagctccagcccatcagcactctctggtatttgggccacctacttctgccctctcacaagaagagcattgaggtgcagacaccaggggtgtatcgatgccagacacggggagcacccgtcagtgaccccatccacctctctgtatccaatgattggctgattctgcaagtgccctatgctccagtgttcgagggtgagccgctagtcctgcgctgccgcggctggtacgacaaggtggtctacaagcttcactactaccacgacggccaggccgtgcgctacttccactccagcgccaactacactgtgttacaggcgcgtgccagcgacagcgggcgctaccagtgctcgggcaccatgcgcatcccggtggagagcgcgcccatgttctccgctaaggtggctgtgacagtgcaagagctgttccgggcgccggtgctgagggtgatgggtccgcgggaggcccgcggcgcggcgctgggtggggtggtgctgcgctgcgacacgcgcctgcacccgcagaagcgcgacacgccgctgcagttcgcgttttacaagtacagccgcgcggtgcgccgcttcgactggggcgccgagtacacagtcccggagcccgaggtcgaggagctcgaatcgtactggtgcgaggcggctaccgccacccgcagtgtccggaaacgcagtccgtggctgcagctcccggggcccggttctcccctggacccggcctccaccaccgccccagctccatgggccgcagccttggctcctggtaataggccgctttccttcagaaagcccccggtgtccagatcggtcccgttggtcacctccgtccggaacaccacctccaccgggctgcagttcccggcgagcggcgccccgactgcggggccacccgcctgcgctccgccgacgcccttggaacaatcggctggagccctgaaacccgacgtggaccttctgctccgagaaatgcagctgctcaaaggccttctgagccgggtggtcctggaattaaaggagccacaggccctccgggagctcaggggaacgcccgagacccccacctctcactttgctgtgagcccgggaaccccagagaccactcctgtggagagctgagggggcggctaccgtcccctctgcaggctcattcctccttggtctcctgcttcccctcacgcgaatttctttcaaagccatctgtttgcatccttgtgttttgctgtggtttttaaaggagcgcccacgaagtgtagtggctgacgatttcaacctcacacagcagtttgtaaccgcaagcattctctttgaattctcacagaattcagcaagaagtagaaacctgttatttactacattgtgatttaactttggatgtgaatttagtcacccttagcccttcagataagcctagccagtacatatttcagcacaggcagtttttttggtatttaagtacattgaggtaactgagcacttgagaatattttagggtcaaagtgtaattattcataatgaatttactctgttgatattaaaaagacgttcagtcctattactgatgagtttacatcttcaaataaatcctgggttctat

SEQ ID NO: 215 - DNA, 642 bp, Homo sapiens
  CDS (1)...(642)
atggtgcctgaagaagagcctcaagaccgagagaaaggactctggtggttccagttgaaggtctggtccatggcagtcgtatccatcttgctcctcagtgtctgtttcactgtgagttctgtggtgcctcacaattttatgtatagcaaaactgtcaagaggctgtccaagttacgagagtatcaacagtatcatccaagcctgacctgcgtcatggaaggaaaggacatagaagattggagctgctgcccaaccccttggacttcatttcagtctagttgctactttatttctactgggatgcaatcttggactaagagtcaaaagaactgttctgtgatgggggctgatctggtggtgatcaacaccagggaagaacaggatttcatcattcagaatctgaaaagaaattcttcttattttctggggctgtcagatccagggggtcggcgacattggcaatgggttgaccagacaccatacaatgaaaatgtcacattctggcactcaggtgaacccaataaccttgatgagcgttgtgcgataataaatttccgttcttcagaagaatggggctggaatgacattcactgtcatgtacctcagaagtcaatttgcaagatgaagaagatctacatataa

SEQ ID NO: 216 - protein, 213 aa, Homo sapiens
MVPEEEPQDREKGLWWFQLKVWSMAVVSILLLSVCFTVSSVVPHNFMYSKTVKRLSKLREYQQYHPSLTCVMEGKDIEDWSCCPTPWTSFQSSCYFISTGMQSWTKSQKNCSVMGADLVVINTREEQDFIIQNLKRNSSYFLGLSDPGGRRHWQWVDQTPYNENVTFWHSGEPNNLDERCAIINFRSSEEWGWNDIHCHVPQKSICKMKKIYI

SEQ ID NO: 217 - DNA, 549 bp, Homo sapiens
  CDS (1)...(549)
atggtgcctgaagaagagcctcaagaccgagtgcctcacaattttatgtatagcaaaactgtcaagaggctgtccaagttacgagagtatcaacagtatcatycaagcctgacctgcgtcatggaaggaaaggacatagaagattggagctgctgcccaaccccttggacttcatttcagtctagttgctactttatttctactgggatgcaatcttggactaagagtcaaaagaactgttctgtgatgggggctgatctggtggtgatcaacaccagggaagaacaggatttcatcattcagaatctgaaaagaaattcttcttattttctggggctgtcagatccagggggtcggcgacattggcaatgggttgaccagacaccatacaatgaaaatgtcacattctggcactcaggtgaacccaataaccttgatgagcgttgtgcgataataaatttccgttcttcagaagaatggggctggaatgacattcactgtcatgtacctcagaagtcaatttgcaagatgaagaagatctacatataa

SEQ ID NO: 218 - protein, 182 aa, Homo sapiens
  VARIANT (1)...(182): Xaa = Any Amino Acid
MVPEEEPQDRVPHNFMYSKTVKRLSKLREYQQYHXSLTCVMEGKDIEDWSCCPTPWTSFQSSCYFISTGMQSWTKSQKNCSVMGADLVVINTREEQDFIIQNLKRNSSYFLGLSDPGGRRHWQWVDQTPYNENVTFWHSGEPNNLDERCAIINFRSSEEWGWNDIHCHVPQKSICKMKKIYI

SEQ ID NO: 219 - DNA, 1260 bp, Homo sapiens
  CDS (1)...(1260)
atgaggaacattttcaagaggaaccaggagcctattgtggctcctgccaccaccaccgccacgatgcccattggacccgtggacaactccactgagagtgggggtgctggggagagtcaggaggacatgtttgccaaactgaaggagaagttattcaatgagataaacaagattcccttaccaccctgggcactgatcgccattgctgtggttgctgggctcctgcttctcacctgctgcttctgcatctgcaagaaatgctgctgcaagaagaagaagaacaagaaggagaagggcaaaggcatgaagaatgccatgaacatgaaggacatgaaagggggtcaggatgacgacgacgcagagacaggcctgactgagggggaaggtgaaggggaggaggagaaagagccagagaacctgggcaaactgcagttttccctggactatgattttcaggctaatcagcttactgtgggcgttctgcaggctgctgaactgcctgccctggacatgggaggcacctcagacccttatgtcaaggtcttcctccttcctgacaagaagaagaaatatgagaccaaagtccatcggaagacactgaaccctgccttcaatgaaaccttcaccttcaaggtgccataccaggagcttgggggcaaaactctggtgatggccatctatgactttgaccgcttctccaaacatgacatcattggagaggtaaaggtgcctatgaacacagtggacctcggccagcccattgaggagtggagagacctgcaaggcggggaaaaggaggagccggagaagctgggcgacatctgcacctccctgcgctatgtgcccacggccgggaagctcactgtctgcatcctggaggctaagaacctcaagaagatggacgtgggcggcctttcagacccgtacgtgaagatccacctgatgcagaatggcaagaggctcaagaagaagaagacaaccgtgaagaagaagaccctgaacccatacttcaacgagtccttcagctttgagatccccttcgagcagattcagaaagtccaggtagtggtcaccgtgctggactatgacaagctgggcaagaacgaagccataggcaagatcttcgtgggcagcaatgccacgggcacagagctgcggcactggtccgacatgctggccaacccccggaggcccatcgcccagtggcactcgctcaagcctgaggaggaggtggatgcactcctgggcaagaacaagtag

SEQ ID NO: 220 - protein, 419 aa, Homo sapiens
MRNIFKRNQEPIVAPATTTATMPIGPVDNSTESGGAGESQEDMFAKLKEKLFNEINKIPLPPWALIAIAVVAGLLLLTCCFCICKKCCCKKKKNKKEKGKGMKNAMNMKDMKGGQDDDDAETGLTEGEGEGEEEKEPENLGKLQFSLDYDFQANQLTVGVLQAAELPALDMGGTSDPYVKVFLLPDKKKKYETKVHRKTLNPAFNETFTFKVPYQELGGKTLVMAIYDFDRFSKHDIIGEVKVPMNTVDLGQPIEEWRDLQGGEKEEPEKLGDICTSLRYVPTAGKLTVCILEAKNLKKMDVGGLSDPYVKIHLMQNGKRLKKKKTTVKKKTLNPYFNESFSFEIPFEQIQKVQVVVTVLDYDKLGKNEAIGKIFVGSNATGTELRHWSDMLANPRRPIAQWHSLKPEEEVDALLGKNK

SEQ ID NO: 221 - DNA, 1441 bp, Homo sapiens
agttggggcagcggtggagcggggacttcgcgcccccaggggaacgggcgcccctgcgaaaccgtcgccagccacgcgtccttgccgtccgacgccccctcacattggagaccccggatctctcccgcctccttcgggtcgctctccgctgtttcctctgccaccatgaggaacattttcaagaggaaccaggagcctattgtggctcctgccaccaccaccgccacgatgcccattggacccgtggacaactccactgagagtgggggtgctggggagagtcaggaggacatgtttgccaaactgaaggagaagttattcaatgagataaacaagattcccttaccaccctgggcactgatcgccattgctgtggttgctgggctcctgcttctcacctgctgcttctgcatctgcaagaaatgctgctgcaagaagaagaagaacaagaaggagaagggcaaaggcatgaagaatgccatgaacatgaaggacatgaaagggggtcaggatgacgacgacgcagagacaggcctgactgagggggaaggtgaaggggaggaggagaaagagccagagaacctgggcaaactgcagttttccctggactatgattttcaggctaatcagcttactgtgggcgttctgcaggctgctgaactgcctgccctggacatgggaggcacctcagacccttatgtcaaggtcttcctccttcctgacaagaagaagaaatatgagaccaaagtccatcggaagacactgaaccctgccttcaatgaaaccttcaccttcaaggtgccataccaggagcttgggggcaaaactctggtgatggccatctatgactttgaccgcttctccaaacatgacatcattggagaggtaaaggtgcctatgaacacagtggacctcggccagcccattgaggagtggagagacctgcaaggcggggaaaaggaggagccggagaagctgggcgacatctgcacctccctgcgctatgtgcccacggccgggaagctcactgtctgcatcctggaggctaagaacctcaagaagatggacgtgggcggcctttcagacccgtacgtgaagatccacctgatgcagaatggcaagaggctcaagaagaagaagacaaccgtgaagaagaagaccctgaacccatacttcaacgagtccttcagctttgagatccccttcgagcagattcagaaagtccaggtagtggtcaccgtgctggactatgacaagctgggcaagaacgaagccataggcaagatcttcgtgggcagcaatgccacgggcacagagctgcggcactggtccgacatgctggccaacccccggaggcccatcgcccagtggcactcgctcaagcctgaggaggaggtggatgcactcctgggcaagaacaagtagacagcagcggctggga

SEQ ID NO: 222 - DNA, 1551 bp, Homo sapiens
  CDS (1)...(1551)
atgccgaccttagatgctccagaagagaggcggagaaaatttaagtaccgaggcaaagatgtgtctctgaggcgacagcagaggatggcggtcagtctggagctccgaaaggccaagaaagatgaacagaccttaaagagaaggaatatcacgagcttctgccctgacacaccttctgaaaaaacagccaaaggggtggcggtcagcctcactctgggtgaaataatcaaaggtgtgaatagctcagatccagtcctatgtttccaggccacccagacagccaggaaaatgctatcccaggaaaagaacccccctctgaaactggtcattgaagcgggcctcattcccaggatggtggagttcctgaagtcatcactttacccctgcttgcagtttgaggctgcctgggccctgaccaacatcgcttcagggacttcggagcagactcgtgccgtggtagaagggggagccatccagcccttgattgagctcctgtcttcctccaacgtggctgtgtgtgaacaggcagtgtgggctcttggtaatatagccggtgatggcccagagttcagagataacgtcatcacaagcaatgccatcccacatctcctagccttgatttcacccaccctgccgatcacatttctgcggaacatcacgtggaccttgtcgaatctgtgccgaaacaagaacccatacccttgcgacactgcggtgaagcagatactgccggccctccttcacctcctgcagcaccaggacagtgaggttctctcggatgcctgctgggcactgtcctacctcaccgacggctccaacaagcgcatcggccaagtggttaacacgggggtcctgcccaggctggtagtgctcatgaccagctcagaactcaatgtcttgactccttctctccgcaccgtggggaacattgtcacgggcacagatgagcagacgcagatggccattgatgcgggtatgctgaacgtgctcccccagctcctgcaacacaacaagccctccatccagaaggaggcagcctgggccctgagcaacgtagcagcggggccttgtcaccacatccagcagctgcttgcctacgacgtcttgcctcccttggtggctctgctaaaaaacggagaatttaaagtccagaaagaggctgtctggatggtggcgaactttgcaacaggggccaccatggatcagctgatccagctcgtccactctggggtcctggagccactggtgaatctgctcactgccccagatgttaaaattgttctcatcatccttgatgtcatctcttgcatcctccaggcggcagagaaacggtctgagaaggaaaacctgtgtcttctgatagaagaacttggtgggatcgatagaattgaggctttacagctgcatgagaaccgtcaaattggccagtcggctttgaacatcatcgagaagcactttggtgaggaagaagatgagagccaaactttactgagccaagtcatagaccaagattatgaatttatagattatgaatgcttagcaaaaaaatag

SEQ ID NO: 223 - protein, 516 aa, Homo sapiens
MPTLDAPEERRRKFKYRGKDVSLRRQQRMAVSLELRKAKKDEQTLKRRNITSFCPDTPSEKTAKGVAVSLTLGEIIKGVNSSDPVLCFQATQTARKMLSQEKNPPLKLVIEAGLIPRMVEFLKSSLYPCLQFEAAWALTNIASGTSEQTRAVVEGGAIQPLIELLSSSNVAVCEQAVWALGNIAGDGPEFRDNVITSNAIPHLLALISPTLPITFLRNITWTLSNLCRNKNPYPCDTAVKQILPALLHLLQHQDSEVLSDACWALSYLTDGSNKRIGQVVNTGVLPRLVVLMTSSELNVLTPSLRTVGNIVTGTDEQTQMAIDAGMLNVLPQLLQHNKPSIQKEAAWALSNVAAGPCHHIQQLLAYDVLPPLVALLKNGEFKVQKEAVWMVANFATGATMDQLIQLVHSGVLEPLVNLLTAPDVKIVLIILDVISCILQAAEKRSEKENLCLLIEELGGIDRIEALQLHENRQIGQSALNIIEKHFGEEEDESQTLLSQVIDQDYEFIDYECLAKK

SEQ ID NO: 224 - DNA, 1599 bp, Homo sapiens
  CDS (1)...(1599)
atgatcaaggaaagagttgttggaggtaacttactacttccagtcaatatgccgaccttagatgctccagaagagaggcggagaaaatttaagtaccgaggcaaagatgtgtctctgaggcgacagcagaggatggcggtcagtctggagctccgaaaggccaagaaagatgaacagaccttaaagagaaggaatatcacgagcttctgccctgacacaccttctgaaaaaacagccaaaggggtggcggtcagcctcactctgggtgaaataatcaaaggtgtgaatagctcagatccagtcctatgtttccaggccacccagacagccaggaaaatgctatcccaggaaaagaacccccctctgaaactggtcattgaagcgggcctcattcccaggatggtggagttcctgaagtcatcactttacccctgcttgcagtttgaggctgcctgggccctgaccaacatcgcttcagggacttcggagcagactcgtgccgtggtagaagggggagccatccagcccttgattgagctcctgtcttcctccaacgtggctgtgtgtgaacaggcagtgtgggctcttggtaatatagccggtgatggcccagagttcagagataacgtcatcacaagcaatgccatcccacatctcctagccttgatttcacccaccctgccgatcacatttctgcggaacatcacgtggaccttgtcgaatctgtgccgaaacaagaacccatacccttgcgacactgcggtgaagcagatactgccggccctccttcacctcctgcagcaccaggacagtgaggttctctcggatgcctgctgggcactgtcctacctcaccgacggctccaacaagcgcatcggccaagtggttaacacgggggtcctgcccaggctggtagtgctcatgaccagctcagaactcaatgtcttgactccttctctccgcaccgtggggaacattgtcacgggcacagatgagcagacgcagatggccattgatgcgggtatgctgaacgtgctcccccagctcctgcaacacaacaagccctccatccagaaggaggcagcctgggccctgagcaacgtagcagcggggccttgtcaccacatccagcagctgcttgcctacgacgtcttgcctcccttggtggctctgctaaaaaacggagaatttaaagtccagaaagaggctgtctggatggtggcgaactttgcaacaggggccaccatggatcagctgatccagctcgtccactctggggtcctggagccactggtgaatctgctcactgccccagatgttaaaattgttctcatcatccttgatgtcatctcttgcatcctccaggcggcagagaaacggtctgagaaggaaaacctgtgtcttctgatagaagaacttggtgggatcgatagaattgaggctttacagctgcatgagaaccgtcaaattggccagtcggctttgaacatcatcgagaagcactttggtgaggaagaagatgagagccaaactttactgagccaagtcatagaccaagattatgaatttatagattatgaatgcttagcaaaaaaatag

SEQ ID NO: 225 - protein, 532 aa, Homo sapiens
MIKERVVGGNLLLPVNMPTLDAPEERRRKFKYRGKDVSLRRQQRMAVSLELRKAKKDEQTLKRRNITSFCPDTPSEKTAKGVAVSLTLGEIIKGVNSSDPVLCFQATQTARKMLSQEKNPPLKLVIEAGLIPRMVEFLKSSLYPCLQFEAAWALTNIASGTSEQTRAVVEGGAIQPLIELLSSSNVAVCEQAVWALGNIAGDGPEFRDNVITSNAIPHLLALISPTLPITFLRNITWTLSNLCRNKNPYPCDTAVKQILPALLHLLQHQDSEVLSDACWALSYLTDGSNKRIGQVVNTGVLPRLVVLMTSSELNVLTPSLRTVGNIVTGTDEQTQMAIDAGMLNVLPQLLQHNKPSIQKEAAWALSNVAAGPCHHIQQLLAYDVLPPLVALLKNGEFKVQKEAVWMVANFATGATMDQLIQLVHSGVLEPLVNLLTAPDVKIVLIILDVISCILQAAEKRSEKENLCLLIEELGGIDRIEALQLHENRQIGQSALNIIEKHFGEEEDESQTLLSQVIDQDYEFIDYECLAKK

SEQ ID NO: 226 - DNA, 1614 bp, Homo sapiens
  CDS (1)...(1614)
atgggcactgaaaatttctttgttgctgtccaacctgcaggtaacttactacttccagtcaatatgccgaccttagatgctccagaagagaggcggagaaaatttaagtaccgaggcaaagatgtgtctctgaggcgacagcagaggatggcggtcagtctggagctccgaaaggccaagaaagatgaacagaccttaaagagaaggaatatcacgagcttctgccctgacacaccttctgaaaaaacagccaaaggggtggcggtcagcctcactctgggtgaaataatcaaaggtgtgaatagctcagatccagtcctatgtttccaggccacccagacagccaggaaaatgctatcccaggaaaagaacccccctctgaaactggtcattgaagcgggcctcattcccaggatggtggagttcctgaagtcatcactttacccctgcttgcagtttgaggctgcctgggccctgaccaacatcgcttcagggacttcggagcagactcgtgccgtggtagaagggggagccatccagcccttgattgagctcctgtcttcctccaacgtggctgtgtgtgaacaggcagtgtgggctcttggtaatatagccggtgatggcccagagttcagagataacgtcatcacaagcaatgccatcccacatctcctagccttgatttcacccaccctgccgatcacatttctgcggaacatcacgtggaccttgtcgaatctgtgccgaaacaagaacccatacccttgcgacactgcggtgaagcagatactgccggccctccttcacctcctgcagcaccaggacagtgaggttctctcggatgcctgctgggcactgtcctacctcaccgacggctccaacaagcgcatcggccaagtggttaacacgggggtcctgcccaggctggtagtgctcatgaccagctcagaactcaatgtcttgactccttctctccgcaccgtggggaacattgtcacgggcacagatgagcagacgcagatggccattgatgcgggtatgctgaacgtgctcccccagctcctgcaacacaacaagccctccatccagaaggaggcagcctgggccctgagcaacgtagcagcggggccttgtcaccacatccagcagctgcttgcctacgacgtcttgcctcccttggtggctctgctaaaaaacggagaatttaaagtccagaaagaggctgtctggatggtggcgaactttgcaacaggggccaccatggatcagctgatccagctcgtccactctggggtcctggagccactggtgaatctgctcactgccccagatgttaaaattgttctcatcatccttgatgtcatctcttgcatcctccaggcggcagagaaacggtctgagaaggaaaacctgtgtcttctgatagaagaacttggtgggatcgatagaattgaggctttacagctgcatgagaaccgtcaaattggccagtcggctttgaacatcatcgagaagcactttggtgaggaagaagatgagagccaaactttactgagccaagtcatagaccaagattatgaatttatagattatgaatgcttagcaaaaaaatag

SEQ ID NO: 227 - protein, 537 aa, Homo sapiens
MGTENFFVAVQPAGNLLLPVNMPTLDAPEERRRKFKYRGKDVSLRRQQRMAVSLELRKAKKDEQTLKRRNITSFCPDTPSEKTAKGVAVSLTLGEIIKGVNSSDPVLCFQATQTARKMLSQEKNPPLKLVIEAGLIPRMVEFLKSSLYPCLQFEAAWALTNIASGTSEQTRAVVEGGAIQPLIELLSSSNVAVCEQAVWALGNIAGDGPEFRDNVITSNAIPHLLALISPTLPITFLRNITWTLSNLCRNKNPYPCDTAVKQILPALLHLLQHQDSEVLSDACWALSYLTDGSNKRIGQVVNTGVLPRLVVLMTSSELNVLTPSLRTVGNIVTGTDEQTQMAIDAGMLNVLPQLLQHNKPSIQKEAAWALSNVAAGPCHHIQQLLAYDVLPPLVALLKNGEFKVQKEAVWMVANFATGATMDQLIQLVHSGVLEPLVNLLTAPDVKIVLIILDVISCILQAAEKRSEKENLCLLIEELGGIDRIEALQLHENRQIGQSALNIIEKHFGEEEDESQTLLSQVIDQDYEFIDYECLAKK

SEQ ID NO: 228 - DNA, 1915 bp, Homo sapiens
agaaaataagactgggaagacagttaaaagggctttcagagatgtttaagcagagactgaatgaagaggagccaagtgtgcagagatcctgggcagagcagctacttcaaaggcccaagtacaatgaacctggaacacttgataatgaagcccaggggtctagaacacaatgatcaaggaaagagttgttggaggtaacttactacttccagtcaatatgccgaccttagatgctccagaagagaggcggagaaaatttaagtaccgaggcaaagatgtgtctctgaggcgacagcagaggatggcggtcagtctggagctccgaaaggccaagaaagatgaacagaccttaaagagaaggaatatcacgagcttctgccctgacacaccttctgaaaaaacagccaaaggggtggcggtcagcctcactctgggtgaaataatcaaaggtgtgaatagctcagatccagtcctatgtttccaggccacccagacagccaggaaaatgctatcccaggaaaagaacccccctctgaaactggtcattgaagcgggcctcattcccaggatggtggagttcctgaagtcatcactttacccctgcttgcagtttgaggctgcctgggccctgaccaacatcgcttcagggacttcggagcagactcgtgccgtggtagaagggggagccatccagcccttgattgagctcctgtcttcctccaacgtggctgtgtgtgaacaggcagtgtgggctcttggtaatatagccggtgatggcccagagttcagagataacgtcatcacaagcaatgccatcccacatctcctagccttgatttcacccaccctgccgatcacatttctgcggaacatcacgtggaccttgtcgaatctgtgccgaaacaagaacccatacccttgcgacactgcggtgaagcagatactgccggccctccttcacctcctgcagcaccaggacagtgaggttctctcggatgcctgctgggcactgtcctacctcaccgacggctccaacaagcgcatcggccaagtggttaacacgggggtcctgcccaggctggtagtgctcatgaccagctcagaactcaatgtcttgactccttctctccgcaccgtggggaacattgtcacgggcacagatgagcagacgcagatggccattgatgcgggtatgctgaacgtgctcccccagctcctgcaacacaacaagccctccatccagaaggaggcagcctgggccctgagcaacgtagcagcggggccttgtcaccacatccagcagctgcttgcctacgacgtcttgcctcccttggtggctctgctaaaaaacggagaatttaaagtccagaaagaggctgtctggatggtggcgaactttgcaacaggggccaccatggatcagctgatccagctcgtccactctggggtcctggagccactggtgaatctgctcactgccccagatgttaaaattgttctcatcatccttgatgtcatctcttgcatcctccaggcggcagagaaacggtctgagaaggaaaacctgtgtcttctgatagaagaacttggtgggatcgatagaattgaggctttacagctgcatgagaaccgtcaaattggccagtcggctttgaacatcatcgagaagcactttggtgaggaagaagatgagagccaaactttactgagccaagtcatagaccaagattatgaatttatagattatgaatgcttagcaaaaaaatagccaagctccctacctcctaaaccaacaacccagtgctaaaggataacttctttaagaagcagcagtcctctatcttagtgtaacccaaatgtgaagcttttaaaacttgacattaataaaatgttcaacacctaaaaaaaaaaaaaa

SEQ ID NO: 229 - DNA, 5961 bp, Homo sapiens
  CDS (1)...(5961)
atgaaggacggcactctcgattacctcctttctccagagggatctcggaagcttctggaactcgtcagataccacattgtcccatttacccagcttgaagtggccactctcatctccacccctcacatcaggagcatggccaaccagctcatacagttcaacaccaccgacaatggacagattctggcaaatgatgtggcaatggaagaaattgagatcactgccaaaaatggccgaatttacacactgacaggagttctcattcctccctccattgtcccgattctgccccatcgatgtgatgaaacaaagagagagatgaaactgggcacttgtgtgagctgttctctggtgtactggagcagatgtcctgctaactctgagcccacagcactcttcacacacagatgtgtctacagtggcaggtttgggagcctgaagagcggctgtgcccggtactgcaatgccactgtgaagattccaaagtgctgcaaaggcttctatggacctgactgcaaccagtgtccaggaggcttctcaaatccatgctcaggaaatggacagtgtgcagatagcctcggcggcaacgggacatgcatttgtgaggagggcttccaaggctcccagtgtcagttctgctctgatcccaataaatacggacctcggtgtaacaaaaaatgcctgtgcgttcacggaacatgcaataacaggatagacagcgatggggcctgcctcactggcacatgcagagacggctctgccgggagactctgtgataagcagacctcagcctgtgggccctacgtgcagttctgtcacatccacgccacctgtgaatacagcaatgggacagccagttgtatttgcaaagcaggatatgaaggagatggaactctgtgttctgagatggacccttgcacaggactaactccaggaggctgtagccgcaatgcagaatgcatcaaaactggcacgggcacccacacctgcgtgtgtcagcagggttggacagggaatgggagagactgctcggagatcaacaactgcctgctgcccagtgcaggcggctgccacgacaacgcatcctgtttgtatgtgggtcccgggcagaatgagtgtgagtgcaagaaaggatttcgaggaaatgggattgactgtgaaccaataacttcatgcttggaacaaaccgggaaatgtcatccattggcaagctgtcaatctacttcgtctggtgtctggagctgtgtttgtcaagagggctatgaaggagatggctttctgtgctatggaaacgcagcagtggaattgtcatttctctccgaagcagctatatttaaccgatggataaataatgcttctctacaacccacactgtcagccacctcaaacctcactgtcctcgtgccttcccaacaagctactgaggacatggaccaggatgagaaaagcttctggttgtcacagagcaatattccagccctaataaagtaccatatgctactaggcacatacagagtggcagatctgcagaccctgtcttcttctgacatgttggcaacatctttgcagggcaacttccttcacttggcaaaggtggatgggaatatcacaattgaaggggcctccattgtcgatggggacaatgcagccacaaatggagtgatacacatcatcaacaaggtgctggtcccacaaagacgtctaactggctccttaccaaacctgctcatgcggctggaacagatgcctgactattccatcttccggggctacatcattcaatataatctggcgaatgcaattgaggctgccgatgcctacacagtgtttgctccaaacaacaatgccatcgagaattacatcagggagaagaaagtcttgtctctagaggaggacgtcctccggtatcatgtggtcctggaggagaaactcctgaagaatgacctgcacaatggcatgcatcgtgagaccatgctgggtttctcctatttccttagcttctttctccataatgaccagctctatgtaaatgaggctccaataaactacaccaatgtagccactgataagggagtgatccatggcttgggaaaagttctggaaattcagaagaacagatgtgataataatgacactactattatacgaggaagatgtaggacatgctcctcagagctgacctgcccattcggaactaaatctctaggtaatgagaagaggagatgcatctatacctcctatttcatgggaagacgaaccctgtttattgggtgccagccaaaatgtgtgagaaccgtcattacgagagaatgctgtgccggcttctttggcccccaatgccagccctgtccagggaatgcccagaatgtctgctttggtaatggcatctgtttggatggagtgaatggcacaggtgtgtgtgagtgtggggagggcttcagcggcacagcctgcgagacctgcaccgagggcaagtacggcatccactgtgaccaagcatgttcttgtgtccatgggagatgcaaccaaggacccttgggagatggctcctgtgactgtgatgttggctggcgaggagtgcattgtgacaatgcaaccacagaagacaactgcaatgggacatgccataccagcgccaactgcctcaccaactcagatggtacagcttcatgcaagtgtgcagcaggattccaaggaaacgggaccatctgcacagcaatcaatgcctgtgagatcagcaatggaggttgctctgccaaggctgactgtaagagaaccaccccaggaaggcgagtgtgcacgtgcaaagcaggctacacgggtgatggcattgtgtgcctggaaatcaacccgtgtttggagaaccatggtggctgtgacaagaatgcggagtgcacacagacaggacccaaccaggctgcctgtaactgtttgccagcatacactggagatggaaaggtctgcacactcatcaatgtctgcttaactaaaaatggcggctgtagtgaatttgccatctgcaaccacactgggcaagtagaaaggacttgtacttgcaagccaaactacattggagatggatttacctgccgcggcagcatttatcaggagcttcccaagaacccgaaaacttcccagtatttcttccagttgcaggagcatttcgtgaaagatctggtcggcccaggccccttcactgtttttgcacctttatctgcagcctttgatgaggaagctcgggttaaagactgggacaaatacggtttaatgccccaggttcttcggtaccatgtggtcgcctgccaccagctgcttctggaaaacctgaaattgatctcaaatgctacttccctccaaggagagccaatagtcatctccgtctctcagagcacggtgtatataaacaataaggctaagatcatatccagtgatatcatcagtactaatgggattgttcatatcatagacaaattgctatctcccaaaaatttgcttatcactcccaaagacaactctggaagaattctgcaaaatcttacgactttggcaacaaacaatggctacatcaaatttagcaacttaatacaggactcaggtttgctgagtgtcatcaccgatcccatccacaccccagtcactctcttctggcccaccgaccaagccctccatgccctacctgctgaacaacaggacttcctgttcaaccaagacaacaaggacaagctgaaggagtatttgaagtttcatgtgatacgagatgccaaggttttagctgtggatcttcccacatccactgcctggaagaccctgcaaggttcagagctgagtgtgaaatgtggagctggcagggacatcggtgacctctttctgaatggccaaacctgcagaattgtgcagcgggagctcttgtttgacctgggtgtggcctacggcattgactgtctgctgattgatcccaccctggggggccgctgtgacacctttactactttcgatgcctcgggggagtgtgggagctgtgtcaatactcccagctgcccaaggtggagtaaaccaaagggtgtgaagcagaagtgtctctacaacctgcccttcaagaggaacctggaaggctgccgggagcggtgcagcctggtgatacagatccccaggtgctgcaagggctacttcgggcgagactgtcaggcctgccctggaggaccagatgccccgtgtaataaccggggtgtctgccttgatcagtactcggccaccggagagtgtaaatgcaacaccggcttcaatgggacggcgtgtgagatgtgctggccggggagattcgggcctgattgtctgccctgtggctgctcagaccacggacagtgcgatgatggcatcacgggctccgggcagtgcctctgtgaaacggggtggacaggcccctcgtgtgacactcaggcagttttgcctgcagtgtgtacgcctccttgttctgctcatgccacctgtaaggagaacaacacgtgtgagtgtaacctggattatgaaggtgacggaatcacatgcacagttgtggatttctgcaaacaggacaacgggggctgtgcaaaggtggccagatgctcccagaagggcacgaaggtctcctgcagctgccagaagggatacaaaggggacgggcacagctgcacagagatagacccctgtgcagacggccttaacggagggtgtcacgagcacgccacctgtaagatgacaggcccgggcaagcacaagtgtgagtgtaaaagtcactatgtcggagatgggctgaactgtgagccggagcagctgcccattgaccgctgcttacaggacaatgggcagtgccatgcagacgccaaatgtgtcgacctccacttccaggataccactgttggggtgttccatctacgctccccactgggccagtataagctgacctttgacaaagccagagaggcctgtgccaacgaagctgcgaccatggcaacctacaaccagctctcctatgcccagaaggccaagtaccacctgtgctcagcaggctggctggagaccgggcgggttgcctaccccacagccttcgcctcccagaactgtggctctggtgtggttgggatagtggactatggacctagacccaacaagagtgaaatgtgggatgtcttctgctatcggatgaaagatgtgaactgcacctgcaaggtgggctatgtgggagatggcttctcatgcagtgggaacctgctgcaggtcctgatgtccttcccctcactcacaaacttcctgacggaagtgctggcctattccaacagctcagctcgaggccgtgcatttctagaacacctgactgacctgtccatccgcggcaccctctttgtgccacagaacagtgggctgggggagaatgagaccttgtctgggcgggacatcgagcaccacctcgccaatgtcagcatgtttttctacaatgaccttgtcaatggcaccaccctgcaaacgaggctgggaagcaagctgctcatcactgccagccaggacccactccaaccgacggagaccaggtttgttgatggaagagccattctgcagtgggacatctttgcctccaatgggatcattcatgtcatttccaggcctttaaaagcaccccctgcccccgtgaccttgacccacactggcttgggagcagggatcttctttgccatcatcctggtgactggggctgttgccttggctgcttactcctactttcggataaaccggagaacaatcggcttccagcattttgagtcggaagaggacattaatgttgcagctcttggcaagcagcagcctgagaatatctcgaaccccttgtatgagagcacaacctcagctcccccagaaccttcctacgaccccttcacggactctgaagaacggcagcttgagggcaatgaccccttgaggacactgtga

SEQ ID NO: 230 - protein, 1986 aa, Homo sapiens
MKDGTLDYLLSPEGSRKLLELVRYHIVPFTQLEVATLISTPHIRSMANQLIQFNTTDNGQILANDVAMEEIEITAKNGRIYTLTGVLIPPSIVPILPHRCDETKREMKLGTCVSCSLVYWSRCPANSEPTALFTHRCVYSGRFGSLKSGCARYCNATVKIPKCCKGFYGPDCNQCPGGFSNPCSGNGQCADSLGGNGTCICEEGFQGSQCQFCSDPNKYGPRCNKKCLCVHGTCNNRIDSDGACLTGTCRDGSAGRLCDKQTSACGPYVQFCHIHATCEYSNGTASCICKAGYEGDGTLCSEMDPCTGLTPGGCSRNAECIKTGTGTHTCVCQQGWTGNGRDCSEINNCLLPSAGGCHDNASCLYVGPGQNECECKKGFRGNGIDCEPITSCLEQTGKCHPLASCQSTSSGVWSCVCQEGYEGDGFLCYGNAAVELSFLSEAAIFNRWINNASLQPTLSATSNLTVLVPSQQATEDMDQDEKSFWLSQSNIPALIKYHMLLGTYRVADLQTLSSSDMLATSLQGNFLHLAKVDGNITIEGASIVDGDNAATNGVIHIINKVLVPQRRLTGSLPNLLMRLEQMPDYSIFRGYIIQYNLANAIEAADAYTVFAPNNNAIENYIREKKVLSLEEDVLRYHVVLEEKLLKNDLHNGMHRETMLGFSYFLSFFLHNDQLYVNEAPINYTNVATDKGVIHGLGKVLEIQKNRCDNNDTTIIRGRCRTCSSELTCPFGTKSLGNEKRRCIYTSYFMGRRTLFIGCQPKCVRTVITRECCAGFFGPQCQPCPGNAQNVCFGNGICLDGVNGTGVCECGEGFSGTACETCTEGKYGIHCDQACSCVHGRCNQGPLGDGSCDCDVGWRGVHCDNATTEDNCNGTCHTSANCLTNSDGTASCKCAAGFQGNGTICTAINACEISNGGCSAKADCKRTTPGRRVCTCKAGYTGDGIVCLEINPCLENHGGCDKNAECTQTGPNQAACNCLPAYTGDGKVCTLINVCLTKNGGCSEFAICNHTGQVERTCTCKPNYIGDGFTCRGSIYQELPKNPKTSQYFFQLQEHFVKDLVGPGPFTVFAPLSAAFDEEARVKDWDKYGLMPQVLRYHVVACHQLLLENLKLISNATSLQGEPIVISVSQSTVYINNKAKIISSDIISTNGIVHIIDKLLSPKNLLITPKDNSGRILQNLTTLATNNGYIKFSNLIQDSGLLSVITDPIHTPVTLFWPTDQALHALPAEQQDFLFNQDNKDKLKEYLKFHVIRDAKVLAVDLPTSTAWKTLQGSELSVKCGAGRDIGDLFLNGQTCRIVQRELLFDLGVAYGIDCLLIDPTLGGRCDTFTTFDASGECGSCVNTPSCPRWSKPKGVKQKCLYNLPFKRNLEGCRERCSLVIQIPRCCKGYFGRDCQACPGGPDAPCNNRGVCLDQYSATGECKCNTGFNGTACEMCWPGRFGPDCLPCGCSDHGQCDDGITGSGQCLCETGWTGPSCDTQAVLPAVCTPPCSAHATCKENNTCECNLDYEGDGITCTVVDFCKQDNGGCAKVARCSQKGTKVSCSCQKGYKGDGHSCTEIDPCADGLNGGCHEHATCKMTGPGKHKCECKSHYVGDGLNCEPEQLPIDRCLQDNGQCHADAKCVDLHFQDTTVGVFHLRSPLGQYKLTFDKAREACANEAATMATYNQLSYAQKAKYHLCSAGWLETGRVAYPTAFASQNCGSGVVGIVDYGPRPNKSEMWDVFCYRMKDVNCTCKVGYVGDGFSCSGNLLQVLMSFPSLTNFLTEVLAYSNSSARGRAFLEHLTDLSIRGTLFVPQNSGLGENETLSGRDIEHHLANVSMFFYNDLVNGTTLQTRLGSKLLITASQDPLQPTETRFVDGRAILQWDIFASNGIIHVISRPLKAPPAPVTLTHTGLGAGIFFAIILVTGAVALAAYSYFRINRRTIGFQHFESEEDINVAALGKQQPENISNPLYESTTSAPPEPSYDPFTDSEERQLEGNDPLRTL

SEQ ID NO: 231 - DNA, 6054 bp, Homo sapiens
  CDS (1)...(6054)
atgcaggaaaccaatttgggacatgccttagatgaggatggagttggtggaccatacaccatttttgttccaaataatgaagcattgaataacatgaaggacggcactctcgattacctcctttctccagagggatctcggaagcttctggaactcgtcagataccacattgtcccatttacccagcttgaagtggccactctcatctccacccctcacatcaggagcatggccaaccagctcatacagttcaacaccaccgacaatggacagattctggcaaatgatgtggcaatggaagaaattgagatcactgccaaaaatggccgaatttacacactgacaggagttctcattcctccctccattgtcccgattctgccccatcgatgtgatgaaacaaagagagagatgaaactgggcacttgtgtgagctgttctctggtgtactggagcagatgtcctgctaactctgagcccacagcactcttcacacacagatgtgtctacagtggcaggtttgggagcctgaagagcggctgtgcccggtactgcaatgccactgtgaagattccaaagtgctgcaaaggcttctatggacctgactgcaaccagtgtccaggaggcttctcaaatccatgctcaggaaatggacagtgtgcagatagcctcggcggcaacgggacatgcatttgtgaggagggcttccaaggctcccagtgtcagttctgctctgatcccaataaatacggacctcggtgtaacaaaaaatgcctgtgcgttcacggaacatgcaataacaggatagacagcgatggggcctgcctcactggcacatgcagagacggctctgccgggagactctgtgataagcagacctcagcctgtgggccctacgtgcagttctgtcacatccacgccacctgtgaatacagcaatgggacagccagttgtatttgcaaagcaggatatgaaggagatggaactctgtgttctgagatggacccttgcacaggactaactccaggaggctgtagccgcaatgcagaatgcatcaaaactggcacgggcacccacacctgcgtgtgtcagcagggttggacagggaatgggagagactgctcggagatcaacaactgcctgctgcccagtgcaggcggctgccacgacaacgcatcctgtttgtatgtgggtcccgggcagaatgagtgtgagtgcaagaaaggatttcgaggaaatgggattgactgtgaaccaataacttcatgcttggaacaaaccgggaaatgtcatccattggcaagctgtcaatctacttcgtctggtgtctggagctgtgtttgtcaagagggctatgaaggagatggctttctgtgctatggaaacgcagcagtggaattgtcatttctctccgaagcagctatatttaaccgatggataaataatgcttctctacaacccacactgtcagccacctcaaacctcactgtcctcgtgccttcccaacaagctactgaggacatggaccaggatgagaaaagcttctggttgtcacagagcaatattccagccctaataaagtaccatatgctactaggcacatacagagtggcagatctgcagaccctgtcttcttctgacatgttggcaacatctttgcagggcaacttccttcacttggcaaaggtggatgggaatatcacaattgaaggggcctccattgtcgatggggacaatgcagccacaaatggagtgatacacatcatcaacaaggtgctggtcccacaaagacgtctaactggctccttaccaaacctgctcatgcggctggaacagatgcctgactattccatcttccggggctacatcattcaatataatctggcgaatgcaattgaggctgccgatgcctacacagtgtttgctccaaacaacaatgccatcgagaattacatcagggagaagaaagtcttgtctctagaggaggacgtcctccggtatcatgtggtcctggaggagaaactcctgaagaatgacctgcacaatggcatgcatcgtgagaccatgctgggtttctcctatttccttagcttctttctccataatgaccagctctatgtaaatgaggctccaataaactacaccaatgtagccactgataagggagtgatccatggcttgggaaaagttctggaaattcagaagaacagatgtgataataatgacactactattatacgaggaagatgtaggacatgctcctcagagctgacctgcccattcggaactaaatctctaggtaatgagaagaggagatgcatctatacctcctatttcatgggaagacgaaccctgtttattgggtgccagccaaaatgtgtgagaaccgtcattacgagagaatgctgtgccggcttctttggcccccaatgccagccctgtccagggaatgcccagaatgtctgctttggtaatggcatctgtttggatggagtgaatggcacaggtgtgtgtgagtgtggggagggcttcagcggcacagcctgcgagacctgcaccgagggcaagtacggcatccactgtgaccaagcatgttcttgtgtccatgggagatgcaaccaaggacccttgggagatggctcctgtgactgtgatgttggctggcgaggagtgcattgtgacaatgcaaccacagaagacaactgcaatgggacatgccataccagcgccaactgcctcaccaactcagatggtacagcttcatgcaagtgtgcagcaggattccaaggaaacgggaccatctgcacagcaatcaatgcctgtgagatcagcaatggaggttgctctgccaaggctgactgtaagagaaccaccccaggaaggcgagtgtgcacgtgcaaagcaggctacacgggtgatggcattgtgtgcctggaaatcaacccgtgtttggagaaccatggtggctgtgacaagaatgcggagtgcacacagacaggacccaaccaggctgcctgtaactgtttgccagcatacactggagatggaaaggtctgcacactcatcaatgtctgcttaactaaaaatggcggctgtagtgaatttgccatctgcaaccacactgggcaagtagaaaggacttgtacttgcaagccaaactacattggagatggatttacctgccgcggcagcatttatcaggagcttcccaagaacccgaaaacttcccagtatttcttccagttgcaggagcatttcgtgaaagatctggtcggcccaggccccttcactgtttttgcacctttatctgcagcctttgatgaggaagctcgggttaaagactgggacaaatacggtttaatgccccaggttcttcggtaccatgtggtcgcctgccaccagctgcttctggaaaacctgaaattgatctcaaatgctacttccctccaaggagagccaatagtcatctccgtctctcagagcacggtgtatataaacaataaggctaagatcatatccagtgatatcatcagtactaatgggattgttcatatcatagacaaattgctatctcccaaaaatttgcttatcactcccaaagacaactctggaagaattctgcaaaatcttacgactttggcaacaaacaatggctacatcaaatttagcaacttaatacaggactcaggtttgctgagtgtcatcaccgatcccatccacaccccagtcactctcttctggcccaccgaccaagccctccatgccctacctgctgaacaacaggacttcctgttcaaccaagacaacaaggacaagctgaaggagtatttgaagtttcatgtgatacgagatgccaaggttttagctgtggatcttcccacatccactgcctggaagaccctgcaaggttcagagctgagtgtgaaatgtggagctggcagggacatcggtgacctctttctgaatggccaaacctgcagaattgtgcagcgggagctcttgtttgacctgggtgtggcctacggcattgactgtctgctgattgatcccaccctggggggccgctgtgacacctttactactttcgatgcctcgggggagtgtgggagctgtgtcaatactcccagctgcccaaggtggagtaaaccaaagggtgtgaagcagaagtgtctctacaacctgcccttcaagaggaacctggaaggctgccgggagcggtgcagcctggtgatacagatccccaggtgctgcaagggctacttcgggcgagactgtcaggcctgccctggaggaccagatgccccgtgtaataaccggggtgtctgccttgatcagtactcggccaccggagagtgtaaatgcaacaccggcttcaatgggacggcgtgtgagatgtgctggccggggagattcgggcctgattgtctgccctgtggctgctcagaccacggacagtgcgatgatggcatcacgggctccgggcagtgcctctgtgaaacggggtggacaggcccctcgtgtgacactcaggcagttttgcctgcagtgtgtacgcctccttgttctgctcatgccacctgtaaggagaacaacacgtgtgagtgtaacctggattatgaaggtgacggaatcacatgcacagttgtggatttctgcaaacaggacaacgggggctgtgcaaaggtggccagatgctcccagaagggcacgaaggtctcctgcagctgccagaagggatacaaaggggacgggcacagctgcacagagatagacccctgtgcagacggccttaacggagggtgtcacgagcacgccacctgtaagatgacaggcccgggcaagcacaagtgtgagtgtaaaagtcactatgtcggagatgggctgaactgtgagccggagcagctgcccattgaccgctgcttacaggacaatgggcagtgccatgcagacgccaaatgtgtcgacctccacttccaggataccactgttggggtgttccatctacgctccccactgggccagtataagctgacctttgacaaagccagagaggcctgtgccaacgaagctgcgaccatggcaacctacaaccagctctcctatgcccagaaggccaagtaccacctgtgctcagcaggctggctggagaccgggcgggttgcctaccccacagccttcgcctcccagaactgtggctctggtgtggttgggatagtggactatggacctagacccaacaagagtgaaatgtgggatgtcttctgctatcggatgaaagatgtgaactgcacctgcaaggtgggctatgtgggagatggcttctcatgcagtgggaacctgctgcaggtcctgatgtccttcccctcactcacaaacttcctgacggaagtgctggcctattccaacagctcagctcgaggccgtgcatttctagaacacctgactgacctgtccatccgcggcaccctctttgtgccacagaacagtgggctgggggagaatgagaccttgtctgggcgggacatcgagcaccacctcgccaatgtcagcatgtttttctacaatgaccttgtcaatggcaccaccctgcaaacgaggctgggaagcaagctgctcatcactgccagccaggacccactccaaccgacggagaccaggtttgttgatggaagagccattctgcagtgggacatctttgcctccaatgggatcattcatgtcatttccaggcctttaaaagcaccccctgcccccgtgaccttgacccacactggcttgggagcagggatcttctttgccatcatcctggtgactggggctgttgccttggctgcttactcctactttcggataaaccggagaacaatcggcttccagcattttgagtcggaagaggacattaatgttgcagctcttggcaagcagcagcctgagaatatctcgaaccccttgtatgagagcacaacctcagctcccccagaaccttcctacgaccccttcacggactctgaagaacggcagcttgagggcaatgaccccttgaggacactgtga

SEQ ID NO: 232 - protein, 2017 aa, Homo sapiens
MQETNLGHALDEDGVGGPYTIFVPNNEALNNMKDGTLDYLLSPEGSRKLLELVRYHIVPFTQLEVATLISTPHIRSMANQLIQFNTTDNGQILANDVAMEEIEITAKNGRIYTLTGVLIPPSIVPILPHRCDETKREMKLGTCVSCSLVYWSRCPANSEPTALFTHRCVYSGRFGSLKSGCARYCNATVKIPKCCKGFYGPDCNQCPGGFSNPCSGNGQCADSLGGNGTCICEEGFQGSQCQFCSDPNKYGPRCNKKCLCVHGTCNNRIDSDGACLTGTCRDGSAGRLCDKQTSACGPYVQFCHIHATCEYSNGTASCICKAGYEGDGTLCSEMDPCTGLTPGGCSRNAECIKTGTGTHTCVCQQGWTGNGRDCSEINNCLLPSAGGCHDNASCLYVGPGQNECECKKGFRGNGIDCEPITSCLEQTGKCHPLASCQSTSSGVWSCVCQEGYEGDGFLCYGNAAVELSFLSEAAIFNRWINNASLQPTLSATSNLTVLVPSQQATEDMDQDEKSFWLSQSNIPALIKYHMLLGTYRVADLQTLSSSDMLATSLQGNFLHLAKVDGNITIEGASIVDGDNAATNGVIHIINKVLVPQRRLTGSLPNLLMRLEQMPDYSIFRGYIIQYNLANAIEAADAYTVFAPNNNAIENYIREKKVLSLEEDVLRYHVVLEEKLLKNDLHNGMHRETMLGFSYFLSFFLHNDQLYVNEAPINYTNVATDKGVIHGLGKVLEIQKNRCDNNDTTIIRGRCRTCSSELTCPFGTKSLGNEKRRCIYTSYFMGRRTLFIGCQPKCVRTVITRECCAGFFGPQCQPCPGNAQNVCFGNGICLDGVNGTGVCECGEGFSGTACETCTEGKYGIHCDQACSCVHGRCNQGPLGDGSCDCDVGWRGVHCDNATTEDNCNGTCHTSANCLTNSDGTASCKCAAGFQGNGTICTAINACEISNGGCSAKADCKRTTPGRRVCTCKAGYTGDGIVCLEINPCLENHGGCDKNAECTQTGPNQAACNCLPAYTGDGKVCTLINVCLTKNGGCSEFAICNHTGQVERTCTCKPNYIGDGFTCRGSIYQELPKNPKTSQYFFQLQEHFVKDLVGPGPFTVFAPLSAAFDEEARVKDWDKYGLMPQVLRYHVVACHQLLLENLKLISNATSLQGEPIVISVSQSTVYINNKAKIISSDIISTNGIVHIIDKLLSPKNLLITPKDNSGRILQNLTTLATNNGYIKFSNLIQDSGLLSVITDPIHTPVTLFWPTDQALHALPAEQQDFLFNQDNKDKLKEYLKFHVIRDAKVLAVDLPTSTAWKTLQGSELSVKCGAGRDIGDLFLNGQTCRIVQRELLFDLGVAYGIDCLLIDPTLGGRCDTFTTFDASGECGSCVNTPSCPRWSKPKGVKQKCLYNLPFKRNLEGCRERCSLVIQIPRCCKGYFGRDCQACPGGPDAPCNNRGVCLDQYSATGECKCNTGFNGTACEMCWPGRFGPDCLPCGCSDHGQCDDGITGSGQCLCETGWTGPSCDTQAVLPAVCTPPCSAHATCKENNTCECNLDYEGDGITCTVVDFCKQDNGGCAKVARCSQKGTKVSCSCQKGYKGDGHSCTEIDPCADGLNGGCHEHATCKMTGPGKHKCECKSHYVGDGLNCEPEQLPIDRCLQDNGQCHADAKCVDLHFQDTTVGVFHLRSPLGQYKLTFDKAREACANEAATMATYNQLSYAQKAKYHLCSAGWLETGRVAYPTAFASQNCGSGVVGIVDYGPRPNKSEMWDVFCYRMKDVNCTCKVGYVGDGFSCSGNLLQVLMSFPSLTNFLTEVLAYSNSSARGRAFLEHLTDLSIRGTLFVPQNSGLGENETLSGRDIEHHLANVSMFFYNDLVNGTTLQTRLGSKLLITASQDPLQPTETRFVDGRAILQWDIFASNGIIHVISRPLKAPPAPVTLTHTGLGAGIFFAIILVTGAVALAAYSYFRINRRTIGFQHFESEEDINVAALGKQQPENISNPLYESTTSAPPEPSYDPFTDSEERQLEGNDPLRTL

SEQ ID NO: 233 - DNA, 6748 bp, Homo sapiens
tgttagaatttgtatttcctaaatcacaatattttatttcctgatttttaagcaaaatgtctctttttagcaaaccataatgacaatgctacaaccaaggtacagcaagttcagatctttgttagaggtaagcacttttcataattttctgaaaaatatttatgtcaagacttttgtaaaattagcaggggtgtcaattataaatttctggcgaattatgttaaatatttgtccaaggtaggctgcagatacaaaatttcatttcccaaatgcaggaaaccaatttgggacatgccttagatgaggatggagttggtggaccatacaccatttttgttccaaataatgaagcattgaataacatgaaggacggcactctcgattacctcctttctccagagggatctcggaagcttctggaactcgtcagataccacattgtcccatttacccagcttgaagtggccactctcatctccacccctcacatcaggagcatggccaaccagctcatacagttcaacaccaccgacaatggacagattctggcaaatgatgtggcaatggaagaaattgagatcactgccaaaaatggccgaatttacacactgacaggagttctcattcctccctccattgtcccgattctgccccatcgatgtgatgaaacaaagagagagatgaaactgggcacttgtgtgagctgttctctggtgtactggagcagatgtcctgctaactctgagcccacagcactcttcacacacagatgtgtctacagtggcaggtttgggagcctgaagagcggctgtgcccggtactgcaatgccactgtgaagattccaaagtgctgcaaaggcttctatggacctgactgcaaccagtgtccaggaggcttctcaaatccatgctcaggaaatggacagtgtgcagatagcctcggcggcaacgggacatgcatttgtgaggagggcttccaaggctcccagtgtcagttctgctctgatcccaataaatacggacctcggtgtaacaaaaaatgcctgtgcgttcacggaacatgcaataacaggatagacagcgatggggcctgcctcactggcacatgcagagacggctctgccgggagactctgtgataagcagacctcagcctgtgggccctacgtgcagttctgtcacatccacgccacctgtgaatacagcaatgggacagccagttgtatttgcaaagcaggatatgaaggagatggaactctgtgttctgagatggacccttgcacaggactaactccaggaggctgtagccgcaatgcagaatgcatcaaaactggcacgggcacccacacctgcgtgtgtcagcagggttggacagggaatgggagagactgctcggagatcaacaactgcctgctgcccagtgcaggcggctgccacgacaacgcatcctgtttgtatgtgggtcccgggcagaatgagtgtgagtgcaagaaaggatttcgaggaaatgggattgactgtgaaccaataacttcatgcttggaacaaaccgggaaatgtcatccattggcaagctgtcaatctacttcgtctggtgtctggagctgtgtttgtcaagagggctatgaaggagatggctttctgtgctatggaaacgcagcagtggaattgtcatttctctccgaagcagctatatttaaccgatggataaataatgcttctctacaacccacactgtcagccacctcaaacctcactgtcctcgtgccttcccaacaagctactgaggacatggaccaggatgagaaaagcttctggttgtcacagagcaatattccagccctaataaagtaccatatgctactaggcacatacagagtggcagatctgcagaccctgtcttcttctgacatgttggcaacatctttgcagggcaacttccttcacttggcaaaggtggatgggaatatcacaattgaaggggcctccattgtcgatggggacaatgcagccacaaatggagtgatacacatcatcaacaaggtgctggtcccacaaagacgtctaactggctccttaccaaacctgctcatgcggctggaacagatgcctgactattccatcttccggggctacatcattcaatataatctggcgaatgcaattgaggctgccgatgcctacacagtgtttgctccaaacaacaatgccatcgagaattacatcagggagaagaaagtcttgtctctagaggaggacgtcctccggtatcatgtggtcctggaggagaaactcctgaagaatgacctgcacaatggcatgcatcgtgagaccatgctgggtttctcctatttccttagcttctttctccataatgaccagctctatgtaaatgaggctccaataaactacaccaatgtagccactgataagggagtgatccatggcttgggaaaagttctggaaattcagaagaacagatgtgataataatgacactactattatacgaggaagatgtaggacatgctcctcagagctgacctgcccattcggaactaaatctctaggtaatgagaagaggagatgcatctatacctcctatttcatgggaagacgaaccctgtttattgggtgccagccaaaatgtgtgagaaccgtcattacgagagaatgctgtgccggcttctttggcccccaatgccagccctgtccagggaatgcccagaatgtctgctttggtaatggcatctgtttggatggagtgaatggcacaggtgtgtgtgagtgtggggagggcttcagcggcacagcctgcgagacctgcaccgagggcaagtacggcatccactgtgaccaagcatgttcttgtgtccatgggagatgcaaccaaggacccttgggagatggctcctgtgactgtgatgttggctggcgaggagtgcattgtgacaatgcaaccacagaagacaactgcaatgggacatgccataccagcgccaactgcctcaccaactcagatggtacagcttcatgcaagtgtgcagcaggattccaaggaaacgggaccatctgcacagcaatcaatgcctgtgagatcagcaatggaggttgctctgccaaggctgactgtaagagaaccaccccaggaaggcgagtgtgcacgtgcaaagcaggctacacgggtgatggcattgtgtgcctggaaatcaacccgtgtttggagaaccatggtggctgtgacaagaatgcggagtgcacacagacaggacccaaccaggctgcctgtaactgtttgccagcatacactggagatggaaaggtctgcacactcatcaatgtctgcttaactaaaaatggcggctgtagtgaatttgccatctgcaaccacactgggcaagtagaaaggacttgtacttgcaagccaaactacattggagatggatttacctgccgcggcagcatttatcaggagcttcccaagaacccgaaaacttcccagtatttcttccagttgcaggagcatttcgtgaaagatctggtcggcccaggccccttcactgtttttgcacctttatctgcagcctttgatgaggaagctcgggttaaagactgggacaaatacggtttaatgccccaggttcttcggtaccatgtggtcgcctgccaccagctgcttctggaaaacctgaaattgatctcaaatgctacttccctccaaggagagccaatagtcatctccgtctctcagagcacggtgtatataaacaataaggctaagatcatatccagtgatatcatcagtactaatgggattgttcatatcatagacaaattgctatctcccaaaaatttgcttatcactcccaaagacaactctggaagaattctgcaaaatcttacgactttggcaacaaacaatggctacatcaaatttagcaacttaatacaggactcaggtttgctgagtgtcatcaccgatcccatccacaccccagtcactctcttctggcccaccgaccaagccctccatgccctacctgctgaacaacaggacttcctgttcaaccaagacaacaaggacaagctgaaggagtatttgaagtttcatgtgatacgagatgccaaggttttagctgtggatcttcccacatccactgcctggaagaccctgcaaggttcagagctgagtgtgaaatgtggagctggcagggacatcggtgacctctttctgaatggccaaacctgcagaattgtgcagcgggagctcttgtttgacctgggtgtggcctacggcattgactgtctgctgattgatcccaccctggggggccgctgtgacacctttactactttcgatgcctcgggggagtgtgggagctgtgtcaatactcccagctgcccaaggtggagtaaaccaaagggtgtgaagcagaagtgtctctacaacctgcccttcaagaggaacctggaaggctgccgggagcggtgcagcctggtgatacagatccccaggtgctgcaagggctacttcgggcgagactgtcaggcctgccctggaggaccagatgccccgtgtaataaccggggtgtctgccttgatcagtactcggccaccggagagtgtaaatgcaacaccggcttcaatgggacggcgtgtgagatgtgctggccggggagattcgggcctgattgtctgccctgtggctgctcagaccacggacagtgcgatgatggcatcacgggctccgggcagtgcctctgtgaaacggggtggacaggcccctcgtgtgacactcaggcagttttgcctgcagtgtgtacgcctccttgttctgctcatgccacctgtaaggagaacaacacgtgtgagtgtaacctggattatgaaggtgacggaatcacatgcacagttgtggatttctgcaaacaggacaacgggggctgtgcaaaggtggccagatgctcccagaagggcacgaaggtctcctgcagctgccagaagggatacaaaggggacgggcacagctgcacagagatagacccctgtgcagacggccttaacggagggtgtcacgagcacgccacctgtaagatgacaggcccgggcaagcacaagtgtgagtgtaaaagtcactatgtcggagatgggctgaactgtgagccggagcagctgcccattgaccgctgcttacaggacaatgggcagtgccatgcagacgccaaatgtgtcgacctccacttccaggataccactgttggggtgttccatctacgctccccactgggccagtataagctgacctttgacaaagccagagaggcctgtgccaacgaagctgcgaccatggcaacctacaaccagctctcctatgcccagaaggccaagtaccacctgtgctcagcaggctggctggagaccgggcgggttgcctaccccacagccttcgcctcccagaactgtggctctggtgtggttgggatagtggactatggacctagacccaacaagagtgaaatgtgggatgtcttctgctatcggatgaaagatgtgaactgcacctgcaaggtgggctatgtgggagatggcttctcatgcagtgggaacctgctgcaggtcctgatgtccttcccctcactcacaaacttcctgacggaagtgctggcctattccaacagctcagctcgaggccgtgcatttctagaacacctgactgacctgtccatccgcggcaccctctttgtgccacagaacagtgggctgggggagaatgagaccttgtctgggcgggacatcgagcaccacctcgccaatgtcagcatgtttttctacaatgaccttgtcaatggcaccaccctgcaaacgaggctgggaagcaagctgctcatcactgccagccaggacccactccaaccgacggagaccaggtttgttgatggaagagccattctgcagtgggacatctttgcctccaatgggatcattcatgtcatttccaggcctttaaaagcaccccctgcccccgtgaccttgacccacactggcttgggagcagggatcttctttgccatcatcctggtgactggggctgttgccttggctgcttactcctactttcggataaaccggagaacaatcggcttccagcattttgagtcggaagaggacattaatgttgcagctcttggcaagcagcagcctgagaatatctcgaaccccttgtatgagagcacaacctcagctcccccagaaccttcctacgaccccttcacggactctgaagaacggcagcttgagggcaatgaccccttgaggacactgtgagggcctggacgggagatgccagccatcactcactgccacctgggccatcaactgtgaattctcagcaccagttgccttttaggaacgtaaagtcctttaagcactcagaagccatacctcatctctctggctgatctgggggttgtttctgtgggtgagagatgtgttgctgtgcccacccagtacagcttcctcctctgaccctttggctcttcttcctttgtactcttcagctggcacctgctccattctgccctacatgatgggtaactgtgatctttcttccctgttagattgtaagcctccgtctttgtatcccagcccctagcccagtgcctgacacaggaactgtgcacaataaaggtttatggaacagaaacaaagtcaaaaaaaaaaaaaaaaaaaaaaaaaaaaaaaaaaaaaac

SEQ ID NO: 234 - DNA, 1248 bp, Homo sapiens
  CDS (1)...(1248)
atggaacaaatatggttgctgctgcttctaacaattagagtgcttccggggtctgctcagttcaacggctacaactgtgatgccaacctccacagtagatttcctgctgaaagagacatcagtgtctattgtggagtgcaggctattacgatgaagattaatttttgcacggtacttttctcgggttattcggaaacagatctggcactgaatggaaggcatggggactcccactgcagagggttcatcaataacaacacctttccagcagtggtcatttttatcatcaatctcagcaccttggagggctgtggaaacaacctggtggtatccacaattcctggagtcagtgcttatggaaatgcaacttcagtgcaagtaggaaatatttcaggatatattgatactccagacccaccaacaatcatcagctatctacctgggcttctttacaaatttagttgtagttatccattggaatacctggttaataatacccagcttgcttcgtcctcagcggctatttctgtgagagagaacaatggcacatttgtcagcactttgaacctgctcctttataacgattcaacctacaaccagcagttaattatccccagtataggattacctttgaaaaccaaagtatttgcagctgtccaagccactaatttggatggcagatggaatgttttaatggattattgctatactaccccatcaggaaacccaaatgatgacattcgatatgatcttttccttagctgtgacaaggaccctcagaccaccgtcattgagaatggccgaagccagcggggccggttttcttttgaagtgttccgatttgtgaaacacaagaatcagaaaatgtccactgtcttcttgcactgcgttaccaagctctgcagagcagatgactgccccttccttatgccgatttgcagccacagagaaaggagagatgctgggaggaggacgacttggagcccccagagctcttctggcagcgcggtgctctctgctggtcccatcattactcggagtgatgagactccaaccaacaattcgcaacttggttctccaagtatgcctcccttccagctgaacgccatcaccagcgcactgatatcaggaatggtcattctgggagttacgagcttttctcttcttctgtgctcactggcccttctgcacaggaagggacccacaagtttagtgttgaatggcataagaaacccagtctttgactga

SEQ ID NO: 235 - protein, 415 aa, Homo sapiens
MEQIWLLLLLTIRVLPGSAQFNGYNCDANLHSRFPAERDISVYCGVQAITMKINFCTVLFSGYSETDLALNGRHGDSHCRGFINNNTFPAVVIFIINLSTLEGCGNNLVVSTIPGVSAYGNATSVQVGNISGYIDTPDPPTIISYLPGLLYKFSCSYPLEYLVNNTQLASSSAAISVRENNGTFVSTLNLLLYNDSTYNQQLIIPSIGLPLKTKVFAAVQATNLDGRWNVLMDYCYTTPSGNPNDDIRYDLFLSCDKDPQTTVIENGRSQRGRFSFEVFRFVKHKNQKMSTVFLHCVTKLCRADDCPFLMPICSHRERRDAGRRTTWSPQSSSGSAVLSAGPIITRSDETPTNNSQLGSPSMPPFQLNAITSALISGMVILGVTSFSLLLCSLALLHRKGPTSLVLNGIRNPVFD

SEQ ID NO: 236 - DNA, 1657 bp, Homo sapiens
tttgttcagtgaattcgggactcagtaactccattagtgactgcacccacatagacctttttctaaaagtctccacatttgtccagttgtttcctccttggtccaatgccaacgctccgtcaatgctattgccacccccattctgcctcttccaaaagcctgcatcagtcatggagtcctcttcacctgaaataaacatttcaaaaagagcagctcttctctcatttgaagccttgactcttttctgaaaaagtttggtaaggtcaggcatttgaacactcagtcacatgcggcagaacctagcacatggaggacagctgactccacagaaccagggatttgggttttgcaatggaacaaatatggttgctgctgcttctaacaattagagtgcttccggggtctgctcagttcaacggctacaactgtgatgccaacctccacagtagatttcctgctgaaagagacatcagtgtctattgtggagtgcaggctattacgatgaagattaatttttgcacggtacttttctcgggttattcggaaacagatctggcactgaatggaaggcatggggactcccactgcagagggttcatcaataacaacacctttccagcagtggtcatttttatcatcaatctcagcaccttggagggctgtggaaacaacctggtggtatccacaattcctggagtcagtgcttatggaaatgcaacttcagtgcaagtaggaaatatttcaggatatattgatactccagacccaccaacaatcatcagctatctacctgggcttctttacaaatttagttgtagttatccattggaatacctggttaataatacccagcttgcttcgtcctcagcggctatttctgtgagagagaacaatggcacatttgtcagcactttgaacctgctcctttataacgattcaacctacaaccagcagttaattatccccagtataggattacctttgaaaaccaaagtatttgcagctgtccaagccactaatttggatggcagatggaatgttttaatggattattgctatactaccccatcaggaaacccaaatgatgacattcgatatgatcttttccttagctgtgacaaggaccctcagaccaccgtcattgagaatggccgaagccagcggggccggttttcttttgaagtgttccgatttgtgaaacacaagaatcagaaaatgtccactgtcttcttgcactgcgttaccaagctctgcagagcagatgactgccccttccttatgccgatttgcagccacagagaaaggagagatgctgggaggaggacgacttggagcccccagagctcttctggcagcgcggtgctctctgctggtcccatcattactcggagtgatgagactccaaccaacaattcgcaacttggttctccaagtatgcctcccttccagctgaacgccatcaccagcgcactgatatcaggaatggtcattctgggagttacgagcttttctcttcttctgtgctcactggcccttctgcacaggaagggacccacaagtttagtgttgaatggcataagaaacccagtctttgactgactataacagattcctgctctctggagaaggcttcactgactaaactatgtgtgactgc

SEQ ID NO: 237 - DNA, 5916 bp, Homo sapiens
  CDS (1)...(5916)
atgaagcgattgttgcaagagtcagaggaagaaatcatggttaccttgggaccctcctccaggctttccccagataaggctaaggcagagaccatgtgtggcaccaagagcaaatcctctggccctgctggatccttaccagaggacaactccctgcccccttgctgtgggtcagcagccttagccattggtggagatagagatggggacctggcccagctttgcagctttgggcagcagaacaacagccagcttcctctgggctccactgcctatgtttcagggtctggttctcaggatccctcatctgtcagcattaccacaagctgtcaggagccctcagagaggaaccaaaccaagacccttttgtccagaggccatggccaaggctgtagccgtgaacagcgggaacctttgggggatgtagtagaatacatcatcagagagctgcaaggcatcagccgtcttcagactgagattgctgagctgcagcagcacttgagccaagtccagggttccgtggatgaagtctctagctgtgtagactcagtactgagtgaaatagaaggcttacaggtgagcacctgttccctggccaaggtgtgtgagggtgaaaaggcccaggaaccccacgtggacagacccagtgaggaagccattctgtatttgtacggacttcctgaacaagatggagaaaatactatggaactggtggaaagctttctagccaagcacctttgtgttaatggcatgcagtgcaacaggtacattaaaaaggcttacagggcaggcacatccccttcccctaggcccactgttgtgaagcttgcccatctagagcatagagacttcatcttgcagaaatccatcctcttgcagaatgtgggagtccgaattgccaccagagaagaaccaagctgcccacagggtaataagaatccccagaaggagtctatatcattttttcaacaacaacatcaggattatagtcagacttctttaaaccaggatgaaccagttcttcagatggaaacaggggacaggggacccataacaggaacatatcagatgaaggctcaggatcaacagagagagcaccaggcccctgagcagcaaggcccttgctttctactcaagaacaatttatcaaaggaaagtgatgtgcccaagctaggggatgaaataaaaggagcatcaagaacatctcaagttatcagtggcagctgtgatgaactgtcagagaaaaaggcttctctgtctaccccccatcagtttgaggaacctgccctagtattaatctcaaaagaggaggcttctgggaagtcccagtttttcaaacagtacagccaaaaacatgaagcatgtaaagtaggaaaaccagaaaatgactgccacgataaaagtgaggccagcagctgcctgtcattgtctgggttactgaagacagagagaataaacgcagaggacaagctcctgggctgcgaagctgggctcgatattctgagctcaaaggaactagaggaccttttggcagacaagtccagaaggcttgcagctctgagctgtgacagcatgatggaggaaattatcatagggcctgagactttcagtgacatggttcatattgacctgaatgaagaggaggaatgtgctgctcacgtcctcaaggatgtctttgacaagtcctcttgtgttctgggtggctctcaggaggatgaggatgtggaaatcaagttttatacaagtaaactgggccgagcaattcaccactttcgttctgctctgcagggtgtgtttcagaagctggagaacagtgggtccatcagtcctgaggacctggaaagcaatgagagtggttcccagtcagagaacagtgatcgacttcttgggacagtgagttcagggggtgcccaggattgctcactggagagccctgggagtcaggggagtgaaagcttgctcagtgtggtctctggtggagttggcgtctccacacagggagagcaaacccctcaggatccaagcaccttctctcttgcttctaataactccttgccaagtgttgctctggctccatgtctgggaagtgagacttgttccaggcctggatctcccaagcagggcagactgagcctagagcaagtgtgtacagagaccgtttacctcaacaagtgcatcaacaattttaagaatgttctaagagagaaaagactaaggcagaaaaaacttctgcatgagctagtacagaaggcaaaccgtctctcagtagaagacatacactcagaagaaaagcgaggagcccttcagattccagatgatggtgacccctctctgcctcagtggctcccggaagggccagccggagggctctatggcattgacagcatgccagatttacgcagaaagaagccactgccacttgtcagtgatctgtcactggtccagtctcggaaggcaggaatcacttctgcaatggctacacgcacttctcttaaggacgaagagctgaaatcccacgtgtataagaaaaccctgcaggccttaatctaccccatttcgtgcaccactcctcataactttgaggtctggacggccactaccccaacctactgctatgagtgtgaaggcctgctctggggcattgcccggcagggcatgcgctgcagcgaatgtggagtcaagtgccatgagaagtgccaggatctgctcaatgctgactgcctgcagcgggctgcagaaaagagctgtaaacatggagctgaggaccggacccagaacattatcatggccatgaaggaccgcatgaagatccgagagcgaaataagccagagatctttgaagttatccgggacgtcttcacagtgaacaaagctgcccatgtgcagcagatgaaaacagtgaagcagagtgtactggatggcacctccaaatggtcagccaagatcaccattactgtggtgtgtgcccagggcctacaagccaaggacaaaacaggatccagtgacccttacgtgactgtgcaagtcagcaaaactaagaagcgtaccaagaccatttttggaaacttgaatcctgtttgggaggagaagttccattttgagtgccacaactcctctgaccgcattaaggtgcgtgtatgggatgaggatgatgacatcaagtcaagagtaaagcaacgcctaaagcgagagtctgatgatttccttggccaaaccatcattgaggttcggaccctaagtggcgagatggacgtctggtacaacttggagaagaggacagacaaatcagccgtctcaggggctatccgactacaaatcagtgtggagatcaagggggaggagaaagtagccccataccacgtgcagtatacatgtctccatgagaatcttttccattacctcacagacattcagggcagtggaggagtccgcatccctgaagctcgaggagacgatgcctggaaggtgtactttgatgagacagcccaagaaattgtggatgaatttgccatgcgttatggcattgagtccatatatcaggccatgacgcactttgcatgtttatcatccaagtacatgtgtcctggtgtgccagcagtgatgagcaccttactggccaacatcaacgcctactatgcccacacaactgcctctaccaatgtctctgcatctgatcgctttgcagcctccaactttgggaaagagagatttgtaaaactgctggaccagctacacaactcactgaggatcgacctctctacatacaggaataatttccctgctgggagtcctgaacggcttcaggacttaaaatccacagtggatttgctgaccagcattactttcttcagaatgaaggtacaagaactgcaaagccctccaagagccagccaggtggtaaaggattgtgtgaaggcctgtttgaactccacatatgaatatatcttcaacaactgccacgacttatacagccgccagtaccagctgaagcaggagctacctccagaggaacaagggcccagcattcggaacctggatttctggcccaagctcatcacactcatcgtgtcaatcatagaggaagataagaattcctacacacctgttctgaaccagtttcctcaggagttgaatgtgggaaaagtcagcgcagaagtgatgtggcatttgtttgcccaagacatgaaatatgcattggaggagcatgagaaagaccacctgtgtaaaagtgctgactacatgaacctgcacttcaaggtgaagtggctccacaatgaatacgtgcgggatctgcctgtcctccaggggcaggtgcctgagtacccagcgtggtttgagcagttcgtgctacaatggctggatgagaatgaggatgtatccctggaattcctgcgtggggccctggaacgagataagaaggatggattccagcagacatcagagcatgcactcttttcctgctctgtggtggatgtcttcacacaactcaatcagagctttgagatcatccggaagctggaatgcccagaccccagcatccttgcccactacatgaggaggtttgctaagaccatcgggaaggtgctgatgcagtatgcagacatcttgtcaaaggacttcccagcctattgcacaaaggagaaactgccctgcatcctgatgaacaacgtgcagcaactgagggtccagctggagaaaatgtttgaggccatgggaggcaaggagctggaccttgaagctgcagacagtctgaaggagctgcaggtgaaactgaatacggttctggatgagctcagcatggtgtttggaaacagtttccaggtacggattgatgagtgtgttcgacaaatggccgacatcctgggccaggttcggggcacagggaatgcatctccagacgccagggcctcagcggctcaggatgcagatagcgtactccggcctctcatggacttcctggatggcaacctcaccctctttgccactgtgtgtgagaagacggttctgaagcgtgtactgaaggagctctggcgcgtggtgatgaacacaatggagaggatgattgttctgcccccactcactgaccagacgggcacccagctgatcttcactgctgccaaggagctgagccatctttccaaactcaaggatcacatggtacgagaggaaacacggaatctcactccaaagcagtgtgcagtccttgacctcgccctggacaccatcaagcaatacttccatgcaggaggcaatgggctgaagaaaaccttcctggagaagagcccagatctgcagtctctacgctatgccctgtctctgtacacacagactactgacactctcatcaagacctttgtgcgctcgcagaccacccaagggtctggtgtggacgatcctgtgggagaagtctctattcaggtggacttgtttacacaccctggtactggggagcacaaggtcacagtgaaagtggtggctgccaatgacctcaagtggcagacagcgggtatgttccggcctttcgtggaggtgactatggttggcccacaccaaagtgataagaagaggaagttcacaaccaaatccaaaagcaacaactgggcccccaagtacaatgagacattccacttcctcctgggaaatgaggaggggcccgagtcctatgagttgcagatatgcgtgaaggattactgctttgcccgggaagatcgcgtgctagggctggctgtgatgcctctgagggatgtcacagccaagggcagctgtgcctgctggtgccccttgggccggaagatccatatggatgagacaggcctgaccattctccggattttatctcagaggagcaatgacgaggtggcccgagaatttgtgaaactcaaatcagagtctcgttccacggaggaggggagctga

SEQ ID NO: 238 - protein, 1971 aa, Homo sapiens
MKRLLQESEEEIMVTLGPSSRLSPDKAKAETMCGTKSKSSGPAGSLPEDNSLPPCCGSAALAIGGDRDGDLAQLCSFGQQNNSQLPLGSTAYVSGSGSQDPSSVSITTSCQEPSERNQTKTLLSRGHGQGCSREQREPLGDVVEYIIRELQGISRLQTEIAELQQHLSQVQGSVDEVSSCVDSVLSEIEGLQVSTCSLAKVCEGEKAQEPHVDRPSEEAILYLYGLPEQDGENTMELVESFLAKHLCVNGMQCNRYIKKAYRAGTSPSPRPTVVKLAHLEHRDFILQKSILLQNVGVRIATREEPSCPQGNKNPQKESISFFQQQHQDYSQTSLNQDEPVLQMETGDRGPITGTYQMKAQDQQREHQAPEQQGPCFLLKNNLSKESDVPKLGDEIKGASRTSQVISGSCDELSEKKASLSTPHQFEEPALVLISKEEASGKSQFFKQYSQKHEACKVGKPENDCHDKSEASSCLSLSGLLKTERINAEDKLLGCEAGLDILSSKELEDLLADKSRRLAALSCDSMMEEIIIGPETFSDMVHIDLNEEEECAAHVLKDVFDKSSCVLGGSQEDEDVEIKFYTSKLGRAIHHFRSALQGVFQKLENSGSISPEDLESNESGSQSENSDRLLGTVSSGGAQDCSLESPGSQGSESLLSVVSGGVGVSTQGEQTPQDPSTFSLASNNSLPSVALAPCLGSETCSRPGSPKQGRLSLEQVCTETVYLNKCINNFKNVLREKRLRQKKLLHELVQKANRLSVEDIHSEEKRGALQIPDDGDPSLPQWLPEGPAGGLYGIDSMPDLRRKKPLPLVSDLSLVQSRKAGITSAMATRTSLKDEELKSHVYKKTLQALIYPISCTTPHNFEVWTATTPTYCYECEGLLWGIARQGMRCSECGVKCHEKCQDLLNADCLQRAAEKSCKHGAEDRTQNIIMAMKDRMKIRERNKPEIFEVIRDVFTVNKAAHVQQMKTVKQSVLDGTSKWSAKITITVVCAQGLQAKDKTGSSDPYVTVQVSKTKKRTKTIFGNLNPVWEEKFHFECHNSSDRIKVRVWDEDDDIKSRVKQRLKRESDDFLGQTIIEVRTLSGEMDVWYNLEKRTDKSAVSGAIRLQISVEIKGEEKVAPYHVQYTCLHENLFHYLTDIQGSGGVRIPEARGDDAWKVYFDETAQEIVDEFAMRYGIESIYQAMTHFACLSSKYMCPGVPAVMSTLLANINAYYAHTTASTNVSASDRFAASNFGKERFVKLLDQLHNSLRIDLSTYRNNFPAGSPERLQDLKSTVDLLTSITFFRMKVQELQSPPRASQVVKDCVKACLNSTYEYIFNNCHDLYSRQYQLKQELPPEEQGPSIRNLDFWPKLITLIVSIIEEDKNSYTPVLNQFPQELNVGKVSAEVMWHLFAQDMKYALEEHEKDHLCKSADYMNLHFKVKWLHNEYVRDLPVLQGQVPEYPAWFEQFVLQWLDENEDVSLEFLRGALERDKKDGFQQTSEHALFSCSVVDVFTQLNQSFEIIRKLECPDPSILAHYMRRFAKTIGKVLMQYADILSKDFPAYCTKEKLPCILMNNVQQLRVQLEKMFEAMGGKELDLEAADSLKELQVKLNTVLDELSMVFGNSFQVRIDECVRQMADILGQVRGTGNASPDARASAAQDADSVLRPLMDFLDGNLTLFATVCEKTVLKRVLKELWRVVMNTMERMIVLPPLTDQTGTQLIFTAAKELSHLSKLKDHMVREETRNLTPKQCAVLDLALDTIKQYFHAGGNGLKKTFLEKSPDLQSLRYALSLYTQTTDTLIKTFVRSQTTQGSGVDDPVGEVSIQVDLFTHPGTGEHKVTVKVVAANDLKWQTAGMFRPFVEVTMVGPHQSDKKRKFTTKSKSNNWAPKYNETFHFLLGNEEGPESYELQICVKDYCFAREDRVLGLAVMPLRDVTAKGSCACWCPLGRKIHMDETGLTILRILSQRSNDEVAREFVKLKSESRSTEEGS

SEQ ID NO: 239 - DNA, 2295 bp, Homo sapiens
  CDS (1)...(2295)
atgaagcgattgttgcaagagtcagaggaagaaatcatggttaccttgggaccctcctccaggctttccccagataaggctaaggcagagaccatgtgtggcaccaagagcaaatcctctggccctgctggatccttaccagaggacaactccctgcccccttgctgtgggtcagcagccttagccattggtggagatagagatggggacctggcccagctttgcagctttgggcagcagaacaacagccagcttcctctgggctccactgcctatgtttcagggtctggttctcaggatccctcatctgtcagcattaccacaagctgtcaggagccctcagagaggaaccaaaccaagacccttttgtccagaggccatggccaaggctgtagccgtgaacagcgggaacctttgggggatgtagtagaatacatcatcagagagctgcaaggcatcagccgtcttcagactgagattgctgagctgcagcagcacttgagccaagtccagggttccgtggatgaagtctctagctgtgtagactcagtactgagtgaaatagaaggcttacaggtgagcacctgttccctggccaaggtgtgtgagggtgaaaaggcccaggaaccccacgtggacagacccagtgaggaagccattctgtatttgtacggacttcctgaacaagatggagaaaatactatggaactggtggaaagctttctagccaagcacctttgtgttaatggcatgcagtgcaacaggtacattaaaaaggcttacagggcaggcacatccccttcccctaggcccactgttgtgaagcttgcccatctagagcatagagacttcatcttgcagaaatccatcctcttgcagaatgtgggagtccgaattgccaccagagaagaaccaagctgcccacagggtaataagaatccccagaaggagtctatatcattttttcaacaacaacatcaggattatagtcagacttctttaaaccaggatgaaccagttcttcagatggaaacaggggacaggggacccataacaggaacatatcagatgaaggctcaggatcaacagagagagcaccaggcccctgagcagcaaggcccttgctttctactcaagaacaatttatcaaaggaaagtgatgtgcccaagctaggggatgaaataaaaggagcatcaagaacatctcaagttatcagtggcagctgtgatgaactgtcagagaaaaaggcttctctgtctaccccccatcagtttgaggaacctgccctagtattaatctcaaaagaggaggcttctgggaagtcccagtttttcaaacagtacagccaaaaacatgaagcatgtaaagtaggaaaaccagaaaatgactgccacgataaaagtgaggccagcagctgcctgtcattgtctgggttactgaagacagagagaataaacgcagaggacaagctcctgggctgcgaagctgggctcgatattctgagctcaaaggaactagaggaccttttggcagacaagtccagaaggcttgcagctctgagctgtgacagcatgatggaggaaattatcatagggcctgagactttcagtgacatggttcatattgacctgaatgaagaggaggaatgtgctgctcacgtcctcaaggatgtctttgacaagtcctcttgtgttctgggtggctctcaggaggatgaggatgtggaaatcaagttttatacaagtaaactgggccgagcaattcaccactttcgttctgctctgcagggtgtgtttcagaagctggagaacagtgggtccatcagtcctgaggacctggaaagcaatgagagtggttcccagtcagagaacagtgatcgacttcttgggacagtgagttcagggggtgcccaggattgctcactggagagccctgggagtcaggggagtgaaagcttgctcagtgtggtctctggtggagttggcgtctccacacagggagagcaaacccctcaggatccaagcaccttctctcttgcttctaataactccttgccaagtgttgctctggctccatgtctgggaagtgagacttgttccaggcctggatctcccaagcagggcagactgagcctagagcaagtgtgtacagagaccgtttacctcaacaagtgcatcaacaattttaagaatgttctaagagagaaaagactaaggcagaaaaaacttctgcatgagctagtacagaaggcaaaccgtctctcagtagaagacatacactcagattccagatga

SEQ ID NO: 240 - protein, 764 aa, Homo sapiens
MKRLLQESEEEIMVTLGPSSRLSPDKAKAETMCGTKSKSSGPAGSLPEDNSLPPCCGSAALAIGGDRDGDLAQLCSFGQQNNSQLPLGSTAYVSGSGSQDPSSVSITTSCQEPSERNQTKTLLSRGHGQGCSREQREPLGDVVEYIIRELQGISRLQTEIAELQQHLSQVQGSVDEVSSCVDSVLSEIEGLQVSTCSLAKVCEGEKAQEPHVDRPSEEAILYLYGLPEQDGENTMELVESFLAKHLCVNGMQCNRYIKKAYRAGTSPSPRPTVVKLAHLEHRDFILQKSILLQNVGVRIATREEPSCPQGNKNPQKESISFFQQQHQDYSQTSLNQDEPVLQMETGDRGPITGTYQMKAQDQQREHQAPEQQGPCFLLKNNLSKESDVPKLGDEIKGASRTSQVISGSCDELSEKKASLSTPHQFEEPALVLISKEEASGKSQFFKQYSQKHEACKVGKPENDCHDKSEASSCLSLSGLLKTERINAEDKLLGCEAGLDILSSKELEDLLADKSRRLAALSCDSMMEEIIIGPETFSDMVHIDLNEEEECAAHVLKDVFDKSSCVLGGSQEDEDVEIKFYTSKLGRAIHHFRSALQGVFQKLENSGSISPEDLESNESGSQSENSDRLLGTVSSGGAQDCSLESPGSQGSESLLSVVSGGVGVSTQGEQTPQDPSTFSLASNNSLPSVALAPCLGSETCSRPGSPKQGRLSLEQVCTETVYLNKCINNFKNVLREKRLRQKKLLHELVQKANRLSVEDIHSDSR

SEQ ID NO: 241 - DNA, 2658 bp, Homo sapiens
  CDS (1)...(2658)
atgcaggaagcaatcattctcctggctctcctgggtgccatgtcagggggagaagcactacacctaatcctcttacctgctacaggcaatgtggcagagaattctccacctgggacttcagtgcacaagttttctgtgaagttatcagcatcattgtcacctgtgatcccaggatttccccagatagtcaactcaaatcccctcactgaagcttttagggtgaattggctgtcaggcacctactttgaggttgtcaccactgggatggaacaactagattttgaaacaggaccaaacatatttgatttgcagatttatgtgaaggatgaggttggtgtcacagaccttcaagtcctgactgtccaggtaacagatgtgaacgagccacctcagtttcaaggcaacttggcagaaggtctacacctctacatagtagaaagagcaaaccctggattcatttaccaggttgaggccttcgatccagaagacacaagccgaaacattcccctcagttatttcctgatttctcccccaaagagcttcagaatgtctgctaatggcaccctcttctccacaacagaattggactttgaagcaggacacagaagtttccatctcatcgtggaggtgagggacagtggaggcctcaaagcctccacagagctccaggtgaacatcgtgaacctcaacgacgaagtccctcgctttaccagcccgacacgagtgtacacagtcctggaggaactgagtccaggaaccatcgtggccaatatcacagcggaggatcctgatgatgaaggttttcccagccacctcctctacagcattaccactgttagcaaatatttcatgataaatcagttgactggtacaatccaagtggcccaaaggatagaccgagatgcaggtgaattgagacaaaatcccaccatttccctggaagttctagtgaaggacagaccatatgggggtcaggagaatcgcatccagataaccttcattgtggaagacgtcaacgacaatcctgccacatgccaaaagttcaccttcagcattatggtgccggaaagaacagccaaggggacgttgcttcttgacctaaacaagttctgctttgatgatgacagtgaggcaccaaacaacagattcaacttcaccatgccatctggagtggggagcggcagcagatttttacaggatccagctggctctgggaagattgtgctgattggtgatctagactacgaaaatccaagtaacctagcagccggcaataaatatacggtgataatccaggtgcaggatgtggcccccccttactataaaaataacgtctacgtttatatcctaacaagcccagaaaatgagtttcctctcatttttgataggccatcctatgtatttgatgtgtcagaaagaaggcccgccagaacccgagtgggacaggtgcgagccactgataaagacctcccccagagcagcctcctgtactccatctccactggaggggccagcctccagtatccaaatgtattttggattaatcccaagacaggagaactccagctggtaactaaagtggactgtgaaacaacccccatctatattctcagaatccaggccaccaacaacgaagacacaagctctgtcactgttactgtgaacatccttgaagaaaatgatgaaaagccaatttgtactccaaactcttatttcctggccctcccagtggatctgaaagttggcacaaatattcagaatttcaagctgacatgtaccgaccttgattccagccccagatctttccgttattccattggcccaggtaacgtcaacaatcatttcaccttctctcccaatgctggttccaatgtcacacgcctgctgcttacatctcgctttgactatgctggtgggtttgataagatctgggactacaagctacttgtctacgtaactgatgacaacttgatgtctgacaggaagaaagcggaggctcttgttgagacaggaacagtgacactgagtattaaagtcattccccacccaaccactatcatcaccacgacccccaggcccagggtcacctatcaggtcctgaggaaaaacgtttactctccatctgcatggtacgtgccgtttgtcatcactttgggctccatattgcttctgggtctcctcgtgtacctggtcgtcctattggccaaagccatccacagacactgcccctgcaagactgggaagaacaaggaacctctgacaaagaaaggagaaacgaagactgcagagagagacgtcgtggtggaaactatccagatgaacactatctttgatggagaagccatagatccagtgaccggggaaacatatgaattcaactcaaaaactggagccagaaagtggaaagatccactaacccaaatgccaaaatggaaagagtccagccaccagggagctgccccacgcagagtcactgctggggaagggatggggtcactgagaagtgccaactgggaagaagatgagctgagtggcaaagcgtgggctgaggatgctggtctgggttccagaaatgaggttggcaagctgggcaacccaaagaacagaaatccagccttcatgaacagggcttaccccaaaccacacccaggaaagtaa

SEQ ID NO: 242 - protein, 885 aa, Homo sapiens
MQEAIILLALLGAMSGGEALHLILLPATGNVAENSPPGTSVHKFSVKLSASLSPVIPGFPQIVNSNPLTEAFRVNWLSGTYFEVVTTGMEQLDFETGPNIFDLQIYVKDEVGVTDLQVLTVQVTDVNEPPQFQGNLAEGLHLYIVERANPGFIYQVEAFDPEDTSRNIPLSYFLISPPKSFRMSANGTLFSTTELDFEAGHRSFHLIVEVRDSGGLKASTELQVNIVNLNDEVPRFTSPTRVYTVLEELSPGTIVANITAEDPDDEGFPSHLLYSITTVSKYFMINQLTGTIQVAQRIDRDAGELRQNPTISLEVLVKDRPYGGQENRIQITFIVEDVNDNPATCQKFTFSIMVPERTAKGTLLLDLNKFCFDDDSEAPNNRFNFTMPSGVGSGSRFLQDPAGSGKIVLIGDLDYENPSNLAAGNKYTVIIQVQDVAPPYYKNNVYVYILTSPENEFPLIFDRPSYVFDVSERRPARTRVGQVRATDKDLPQSSLLYSISTGGASLQYPNVFWINPKTGELQLVTKVDCETTPIYILRIQATNNEDTSSVTVTVNILEENDEKPICTPNSYFLALPVDLKVGTNIQNFKLTCTDLDSSPRSFRYSIGPGNVNNHFTFSPNAGSNVTRLLLTSRFDYAGGFDKIWDYKLLVYVTDDNLMSDRKKAEALVETGTVTLSIKVIPHPTTIITTTPRPRVTYQVLRKNVYSPSAWYVPFVITLGSILLLGLLVYLVVLLAKAIHRHCPCKTGKNKEPLTKKGETKTAERDVVVETIQMNTIFDGEAIDPVTGETYEFNSKTGARKWKDPLTQMPKWKESSHQGAAPRRVTAGEGMGSLRSANWEEDELSGKAWAEDAGLGSRNEVGKLGNPKNRNPAFMNRAYPKPHPGK

SEQ ID NO: 243 - DNA, 2565 bp, Homo sapiens
  CDS (1)...(2565)
atgcaggaagcaatcattctcctggctctcctgggtgccatgtcagggggagaagcactacacctaatcctcttacctgctacaggcaatgtggcagagaattctccacctgggacttcagtgcacaagttttctgtgaagttatcagcatcattgtcacctgtgatcccaggatttccccagatagtcaactcaaatcccctcactgaagcttttaggatttatgtgaaggatgaggttggtgtcacagaccttcaagtcctgactgtccaggtaacagatgtgaacgagccacctcagtttcaaggcaacttggcagaaggtctacacctctacatagtagaaagagcaaaccctggattcatttaccaggttgaggccttcgatccagaagacacaagccgaaacattcccctcagttatttcctgatttctcccccaaagagcttcagaatgtctgctaatggcaccctcttctccacaacagaattggactttgaagcaggacacagaagtttccatctcatcgtggaggtgagggacagtggaggcctcaaagcctccacagagctccaggtgaacatcgtgaacctcaacgacgaagtccctcgctttaccagcccgacacgagtgtacacagtcctggaggaactgagtccaggaaccatcgtggccaatatcacagcggaggatcctgatgatgaaggttttcccagccacctcctctacagcattaccactgttagcaaatatttcatgataaatcagttgactggtacaatccaagtggcccaaaggatagaccgagatgcaggtgaattgagacaaaatcccaccatttccctggaagttctagtgaaggacagaccatatgggggtcaggagaatcgcatccagataaccttcattgtggaagacgtcaacgacaatcctgccacatgccaaaagttcaccttcagcattatggtgccggaaagaacagccaaggggacgttgcttcttgacctaaacaagttctgctttgatgatgacagtgaggcaccaaacaacagattcaacttcaccatgccatctggagtggggagcggcagcagatttttacaggatccagctggctctgggaagattgtgctgattggtgatctagactacgaaaatccaagtaacctagcagccggcaataaatatacggtgataatccaggtgcaggatgtggcccccccttactataaaaataacgtctacgtttatatcctaacaagcccagaaaatgagtttcctctcatttttgataggccatcctatgtatttgatgtgtcagaaagaaggcccgccagaacccgagtgggacaggtgcgagccactgataaagacctcccccagagcagcctcctgtactccatctccactggaggggccagcctccagtatccaaatgtattttggattaatcccaagacaggagaactccagctggtaactaaagtggactgtgaaacaacccccatctatattctcagaatccaggccaccaacaacgaagacacaagctctgtcactgttactgtgaacatccttgaagaaaatgatgaaaagccaatttgtactccaaactcttatttcctggccctcccagtggatctgaaagttggcacaaatattcagaatttcaagctgacatgtaccgaccttgattccagccccagatctttccgttattccattggcccaggtaacgtcaacaatcatttcaccttctctcccaatgctggttccaatgtcacacgcctgctgcttacatctcgctttgactatgctggtgggtttgataagatctgggactacaagctacttgtctacgtaactgatgacaacttgatgtctgacaggaagaaagcggaggctcttgttgagacaggaacagtgacactgagtattaaagtcattccccacccaaccactatcatcaccacgacccccaggcccagggtcacctatcaggtcctgaggaaaaacgtttactctccatctgcatggtacgtgccgtttgtcatcactttgggctccatattgcttctgggtctcctcgtgtacctggtcgtcctattggccaaagccatccacagacactgcccctgcaagactgggaagaacaaggaacctctgacaaagaaaggagaaacgaagactgcagagagagacgtcgtggtggaaactatccagatgaacactatctttgatggagaagccatagatccagtgaccggggaaacatatgaattcaactcaaaaactggagccagaaagtggaaagatccactaacccaaatgccaaaatggaaagagtccagccaccagggagctgccccacgcagagtcactgctggggaagggatggggtcactgagaagtgccaactgggaagaagatgagctgagtggcaaagcgtgggctgaggatgctggtctgggttccagaaatgaggttggcaagctgggcaacccaaagaacagaaatccagccttcatgaacagggcttaccccaaaccacacccaggaaagtaa

SEQ ID NO: 244 - protein, 854 aa, Homo sapiens
MQEAIILLALLGAMSGGEALHLILLPATGNVAENSPPGTSVHKFSVKLSASLSPVIPGFPQIVNSNPLTEAFRIYVKDEVGVTDLQVLTVQVTDVNEPPQFQGNLAEGLHLYIVERANPGFIYQVEAFDPEDTSRNIPLSYFLISPPKSFRMSANGTLFSTTELDFEAGHRSFHLIVEVRDSGGLKASTELQVNIVNLNDEVPRFTSPTRVYTVLEELSPGTIVANITAEDPDDEGFPSHLLYSITTVSKYFMINQLTGTIQVAQRIDRDAGELRQNPTISLEVLVKDRPYGGQENRIQITFIVEDVNDNPATCQKFTFSIMVPERTAKGTLLLDLNKFCFDDDSEAPNNRFNFTMPSGVGSGSRFLQDPAGSGKIVLIGDLDYENPSNLAAGNKYTVIIQVQDVAPPYYKNNVYVYILTSPENEFPLIFDRPSYVFDVSERRPARTRVGQVRATDKDLPQSSLLYSISTGGASLQYPNVFWINPKTGELQLVTKVDCETTPIYILRIQATNNEDTSSVTVTVNILEENDEKPICTPNSYFLALPVDLKVGTNIQNFKLTCTDLDSSPRSFRYSIGPGNVNNHFTFSPNAGSNVTRLLLTSRFDYAGGFDKIWDYKLLVYVTDDNLMSDRKKAEALVETGTVTLSIKVIPHPTTIITTTPRPRVTYQVLRKNVYSPSAWYVPFVITLGSILLLGLLVYLVVLLAKAIHRHCPCKTGKNKEPLTKKGETKTAERDVVVETIQMNTIFDGEAIDPVTGETYEFNSKTGARKWKDPLTQMPKWKESSHQGAAPRRVTAGEGMGSLRSANWEEDELSGKAWAEDAGLGSRNEVGKLGNPKNRNPAFMNRAYPKPHPGK

SEQ ID NO: 245 - DNA, 696 bp, Homo sapiens
  CDS (1)...(696)
atgcaggaagcaatcattctcctggctctcctgggtgccatgtcagggggagaagcactacacctaatcctcttacctgctacaggcaatgtggcagagaattctccacctgggacttcagtgcacaagttttctgtgaagttatcagcatcattgtcacctgtgatcccaggatttccccagatagtcaactcaaatcccctcactgaagcttttagggtgaattggctgtcaggcacctactttgaggttgtcaccactgggatggaacaactagattttgaaacaggaccaaacatatttgatttgcagatttatgtgaaggatgaggttggtgtcacagaccttcaagtcctgactgtccaggtaacagatgtgaacgagccacctcagtttcaaggcaacttggcagaaggtctacacctctacatagtagaaagagcaaaccctggattcatttaccaggttgaggccttcgatccagaagacacaagccgaaacattcccctcagttttccatctcatcgtggaggtgagggacagtggaggcctcaaagcctccacagagctccaggtgaacatcgtgaacctcaacgacgaagtccctcgctttaccagcccgacacgagtgtacacagtcctggaggaactgagtccaggaaccatcgtggccaatatcacagcggaggatcctga

SEQ ID NO: 246 - protein, 231 aa, Homo sapiens
MQEAIILLALLGAMSGGEALHLILLPATGNVAENSPPGTSVHKFSVKLSASLSPVIPGFPQIVNSNPLTEAFRVNWLSGTYFEVVTTGMEQLDFETGPNIFDLQIYVKDEVGVTDLQVLTVQVTDVNEPPQFQGNLAEGLHLYIVERANPGFIYQVEAFDPEDTSRNIPLSFPSHRGGEGQWRPQSLHRAPGEHREPQRRSPSLYQPDTSVHSPGGTESRNHRGQYHSGGS

SEQ ID NO: 247 - DNA, 1842 bp, Homo sapiens
  CDS (1)...(1842)
atgcaggaagcaatcattctcctggctctcctgggtgccatgtcagtgactggtacaatccaagtggcccaaaggatagaccgagatgcaggtgaattgagacaaaatcccaccatttccctggaagttctagtgaaggacagaccatatgggggtcaggagaatcgcatccagataaccttcattgtggaagacgtcaacgacaatcctgccacatgccaaaagttcaccttcagcattatggtgccggaaagaacagccaaggggacgttgcttcttgacctaaacaagttctgctttgatgatgacagtgaggcaccaaacaacagattcaacttcaccatgccatctggagtggggagcggcagcagatttttacaggatccagctggctctgggaagattgtgctgattggtgatctagactacgaaaatccaagtaacctagcagccggcaataaatatacggtgataatccaggtgcaggatgtggcccccccttactataaaaataacgtctacgtttatatcctaacaagcccagaaaatgagtttcctctcatttttgataggccatcctatgtatttgatgtgtcagaaagaaggcccgccagaacccgagtgggacaggtgcgagccactgataaagacctcccccagagcagcctcctgtactccatctccactggaggggccagcctccagtatccaaatgtattttggattaatcccaagacaggagaactccagctggtaactaaagtggactgtgaaacaacccccatctatattctcagaatccaggccaccaacaacgaagacacaagctctgtcactgttactgtgaacatccttgaagaaaatgatgaaaagccaatttgtactccaaactcttatttcctggccctcccagtggatctgaaagttggcacaaatattcagaatttcaagctgacatgtaccgaccttgattccagccccagatctttccgttattccattggcccaggtaacgtcaacaatcatttcaccttctctcccaatgctggttccaatgtcacacgcctgctgcttacatctcgctttgactatgctggtgggtttgataagatctgggactacaagctacttgtctacgtaactgatgacaacttgatgtctgacaggaagaaagcggaggctcttgttgagacaggaacagtgacactgagtattaaagtcattccccacccaaccactatcatcaccacgacccccaggcccagggtcacctatcaggtcctgaggaaaaacgtttactctccatctgcatggtacgtgccgtttgtcatcactttgggctccatattgcttctgggtctcctcgtgtacctggtcgtcctattggccaaagccatccacagacactgcccctgcaagactgggaagaacaaggaacctctgacaaagaaaggagaaacgaagactgcagagagagacgtcgtggtggaaactatccagatgaacactatctttgatggagaagccatagatccagtgaccggggaaacatatgaattcaactcaaaaactggagccagaaagtggaaagatccactaacccaaatgccaaaatggaaagagtccagccaccagggagctgccccacgcagagtcactgctggggaagggatggggtcactgagaagtgccaactgggaagaagatgagctgagtggcaaagcgtgggctgaggatgctggtctgggttccagaaatgaggttggcaagctgggcaacccaaagaacagaaatccagccttcatgaacagggcttaccccaaaccacacccaggaaagtaa

SEQ ID NO: 248 - protein, 613 aa, Homo sapiens
MQEAIILLALLGAMSVTGTIQVAQRIDRDAGELRQNPTISLEVLVKDRPYGGQENRIQITFIVEDVNDNPATCQKFTFSIMVPERTAKGTLLLDLNKFCFDDDSEAPNNRFNFTMPSGVGSGSRFLQDPAGSGKIVLIGDLDYENPSNLAAGNKYTVIIQVQDVAPPYYKNNVYVYILTSPENEFPLIFDRPSYVFDVSERRPARTRVGQVRATDKDLPQSSLLYSISTGGASLQYPNVFWINPKTGELQLVTKVDCETTPIYILRIQATNNEDTSSVTVTVNILEENDEKPICTPNSYFLALPVDLKVGTNIQNFKLTCTDLDSSPRSFRYSIGPGNVNNHFTFSPNAGSNVTRLLLTSRFDYAGGFDKIWDYKLLVYVTDDNLMSDRKKAEALVETGTVTLSIKVIPHPTTIITTTPRPRVTYQVLRKNVYSPSAWYVPFVITLGSILLLGLLVYLVVLLAKAIHRHCPCKTGKNKEPLTKKGETKTAERDVVVETIQMNTIFDGEAIDPVTGETYEFNSKTGARKWKDPLTQMPKWKESSHQGAAPRRVTAGEGMGSLRSANWEEDELSGKAWAEDAGLGSRNEVGKLGNPKNRNPAFMNRAYPKPHPGK

SEQ ID NO: 249 - DNA, 2583 bp, Homo sapiens
  CDS (1)...(2583)
atgcaggaagcaatcattctcctggctctcctgggtgccatgtcagggggagaagcactacacctaatcctcttacctgctacaggcaatgtggcagagaattctccacctgggacttcagtgcacaagttttctgtgaagttatcagcatcattgtcacctgtgatcccaggatttccccagatagtcaactcaaatcccctcactgaagcttttagggtgaattggctgtcaggcacctactttgaggttgtcaccactgggatggaacaactagattttgaaacaggaccaaacatatttgatttgcagatttatgtgaaggatgaggttggtgtcacagaccttcaagtcctgactgtccaggtaacagatgtgaacgagccacctcagtttcaaggcaacttggcagaaggtctacacctctacatagtagaaagagcaaaccctggattcatttaccaggttgaggccttcgatccagaagacacaagccgaaacattcccctcagttatttcctgatttctcccccaaagagcttcagaatgtctgctaatggcaccctcttctccacaacagaattggactttgaagcaggacacagaagtttccatctcatcgtggaggtgagggacagtggaggcctcaaagcctccacagagctccaggtgaacatcgtgaacctcaacgacgaagtccctcgctttaccagcccgacacgagtgtacacagtcctggaggaactgagtccaggaaccatcgtggccaatatcacagcggaggatcctgatgatgaaggttttcccagccacctcctctacagcattaccactgttagcaaatatttcatgataaatcagttgactggtacaatccaagtggcccaaaggatagaccgagatgcaggtgaattgagacaaaatcccaccatttccctggaagttctagtgaaggacagaccatatgggggtcaggagaatcgcatccagataaccttcattgtggaagacgtcaacgacaatcctgccacatgccaaaagttcaccttcagtgaggcaccaaacaacagattcaacttcaccatgccatctggagtggggagcggcagcagatttttacaggatccagctggctctgggaagattgtgctgattggtgatctagactacgaaaatccaagtaacctagcagccggcaataaatatacggtgataatccaggtgcaggatgtggcccccccttactataaaaataacgtctacgtttatatcctaacaagcccagaaaatgagtttcctctcatttttgataggccatcctatgtatttgatgtgtcagaaagaaggcccgccagaacccgagtgggacaggtgcgagccactgataaagacctcccccagagcagcctcctgtactccatctccactggaggggccagcctccagtatccaaatgtattttggattaatcccaagacaggagaactccagctggtaactaaagtggactgtgaaacaacccccatctatattctcagaatccaggccaccaacaacgaagacacaagctctgtcactgttactgtgaacatccttgaagaaaatgatgaaaagccaatttgtactccaaactcttatttcctggccctcccagtggatctgaaagttggcacaaatattcagaatttcaagctgacatgtaccgaccttgattccagccccagatctttccgttattccattggcccaggtaacgtcaacaatcatttcaccttctctcccaatgctggttccaatgtcacacgcctgctgcttacatctcgctttgactatgctggtgggtttgataagatctgggactacaagctacttgtctacgtaactgatgacaacttgatgtctgacaggaagaaagcggaggctcttgttgagacaggaacagtgacactgagtattaaagtcattccccacccaaccactatcatcaccacgacccccaggcccagggtcacctatcaggtcctgaggaaaaacgtttactctccatctgcatggtacgtgccgtttgtcatcactttgggctccatattgcttctgggtctcctcgtgtacctggtcgtcctattggccaaagccatccacagacactgcccctgcaagactgggaagaacaaggaacctctgacaaagaaaggagaaacgaagactgcagagagagacgtcgtggtggaaactatccagatgaacactatctttgatggagaagccatagatccagtgaccggggaaacatatgaattcaactcaaaaactggagccagaaagtggaaagatccactaacccaaatgccaaaatggaaagagtccagccaccagggagctgccccacgcagagtcactgctggggaagggatggggtcactgagaagtgccaactgggaagaagatgagctgagtggcaaagcgtgggctgaggatgctggtctgggttccagaaatgaggttggcaagctgggcaacccaaagaacagaaatccagccttcatgaacagggcttaccccaaaccacacccaggaaagtaa

SEQ ID NO: 250 - protein, 860 aa, Homo sapiens
MQEAIILLALLGAMSGGEALHLILLPATGNVAENSPPGTSVHKFSVKLSASLSPVIPGFPQIVNSNPLTEAFRVNWLSGTYFEVVTTGMEQLDFETGPNIFDLQIYVKDEVGVTDLQVLTVQVTDVNEPPQFQGNLAEGLHLYIVERANPGFIYQVEAFDPEDTSRNIPLSYFLISPPKSFRMSANGTLFSTTELDFEAGHRSFHLIVEVRDSGGLKASTELQVNIVNLNDEVPRFTSPTRVYTVLEELSPGTIVANITAEDPDDEGFPSHLLYSITTVSKYFMINQLTGTIQVAQRIDRDAGELRQNPTISLEVLVKDRPYGGQENRIQITFIVEDVNDNPATCQKFTFSEAPNNRFNFTMPSGVGSGSRFLQDPAGSGKIVLIGDLDYENPSNLAAGNKYTVIIQVQDVAPPYYKNNVYVYILTSPENEFPLIFDRPSYVFDVSERRPARTRVGQVRATDKDLPQSSLLYSISTGGASLQYPNVFWINPKTGELQLVTKVDCETTPIYILRIQATNNEDTSSVTVTVNILEENDEKPICTPNSYFLALPVDLKVGTNIQNFKLTCTDLDSSPRSFRYSIGPGNVNNHFTFSPNAGSNVTRLLLTSRFDYAGGFDKIWDYKLLVYVTDDNLMSDRKKAEALVETGTVTLSIKVIPHPTTIITTTPRPRVTYQVLRKNVYSPSAWYVPFVITLGSILLLGLLVYLVVLLAKAIHRHCPCKTGKNKEPLTKKGETKTAERDVVVETIQMNTIFDGEAIDPVTGETYEFNSKTGARKWKDPLTQMPKWKESSHQGAAPRRVTAGEGMGSLRSANWEEDELSGKAWAEDAGLGSRNEVGKLGNPKNRNPAFMNRAYPKPHPGK

SEQ ID NO: 251 - DNA, 2082 bp, Homo sapiens
  CDS (1)...(2082)
atgcaggaagcaatcattctcctggctctcctgggtgccatgtcagggggagaagcactacacctaatcctcttacctgctacaggcaatgtggcagagaattctccacctgggacttcagtgcacaagttttctgtgaagttatcagcatcattgtcacctgtgatcccaggatttccccagatagtcaactcaaatcccctcactgaagcttttagggtgaattggctgtcaggcacctactttgaggttgtcaccactgggatggaacaactagattttgaaacaggaccaaacatatttgatttgcagatttatgtgaaggatgaggttggtgtcacagaccttcaagtcctgactgtccaggtaacagatgtgaacgagccacctcagtttcaaggcaacttggcagaaggtctacacctctacatagtagaaagagcaaaccctggattcatttaccaggttgaggccttcgatccagaagacacaagccgaaacattcccctcagttatttcctgatttctcccccaaagagcttcagaatgtctgctaatggcaccctcttctccacaacagaattggactttgaagcaggacacagaagtttccatctcatcgtggaggtgagggacagtggaggcctcaaagcctccacagagctccaggtgaacatcgtgaacctcaacgacgaagtccctcgctttaccagcccgacacgagtgtacacagtcctggaggaactgagtccaggaaccatcgtggccaatatcacagcggaggatcctgatgatgaaggttttcccagccacctcctctacagcattaccactgttagcaaatatttcatgataaatcagttgactggtacaatccaagtggcccaaaggatagaccgagatgcaggtgaattgagacaaaatcccaccatttccctggaagttctagtgaaggacagaccatatgggggtcaggagaatcgcatccagataaccttcattgtggaagacgtcaacgacaatcctgccacatgccaaaagttcaccttcagcattatggtgccggaaagaacagccaaggggacgttgcttcttgacctaaacaagttctgctttgatgatgacagtgaggcaccaaacaacagattcaacttcaccatgccatctggagtggggagcggcagcagatttttacaggatccagctggctctgggaagattgtgctgattggtgatctagactacgaaaatccaagtaacctagcagccggcaataaatatacggtgataatccaggtgcaggatgtggcccccccttactataaaaataacgtctacgtttatatcctaacaagcccagaaaatgagtttcctctcatttttgataggccatcctatgtatttgatgtgtcagaaagaaggcccgccagaacccgagtgggacaggtgcgagccactgataaagacctcccccagagcagcctcctgtactccatctccactggaggggccagcctccagtatccaaatgtattttggattaatcccaagacaggagaactccagctggtaactaaagtggactgtgaaacaacccccatctatattctcagaatccaggccaccaacaacgaagacacaagctctgtcactgttactgtgaacatccttgaagaaaatgatgaaaagccaatttgtactccaaactcttatttcctggccctcccagtggatctgaaagttggcacaaatattcagaatttcaagctgacatgtaccgaccttgattccagccccagatctttccgttattccattggcccagcccagggtcacctatcaggtcctgaggaaaaacgtttactctccatctgcatggtacgtgccgtttgtcatcactttgggctccatattgcttctgggtctcctcgtgtacctggtcgtcctattggccaaagccatccacagacactgcccctgcaagactgggaagaacaaggaacctctgacaaagaaaggagaaacgaagactgcagagagagacgtcgtggtggaaactatccagatgaacactatctttga

SEQ ID NO: 252 - protein, 693 aa, Homo sapiens
MQEAIILLALLGAMSGGEALHLILLPATGNVAENSPPGTSVHKFSVKLSASLSPVIPGFPQIVNSNPLTEAFRVNWLSGTYFEVVTTGMEQLDFETGPNIFDLQIYVKDEVGVTDLQVLTVQVTDVNEPPQFQGNLAEGLHLYIVERANPGFIYQVEAFDPEDTSRNIPLSYFLISPPKSFRMSANGTLFSTTELDFEAGHRSFHLIVEVRDSGGLKASTELQVNIVNLNDEVPRFTSPTRVYTVLEELSPGTIVANITAEDPDDEGFPSHLLYSITTVSKYFMINQLTGTIQVAQRIDRDAGELRQNPTISLEVLVKDRPYGGQENRIQITFIVEDVNDNPATCQKFTFSIMVPERTAKGTLLLDLNKFCFDDDSEAPNNRFNFTMPSGVGSGSRFLQDPAGSGKIVLIGDLDYENPSNLAAGNKYTVIIQVQDVAPPYYKNNVYVYILTSPENEFPLIFDRPSYVFDVSERRPARTRVGQVRATDKDLPQSSLLYSISTGGASLQYPNVFWINPKTGELQLVTKVDCETTPIYILRIQATNNEDTSSVTVTVNILEENDEKPICTPNSYFLALPVDLKVGTNIQNFKLTCTDLDSSPRSFRYSIGPAQGHLSGPEEKRLLSICMVRAVCHHFGLHIASGSPRVPGRPIGQSHPQTLPLQDWEEQGTSDKERRNEDCRERRRGGNYPDEHYL

SEQ ID NO: 253 - DNA, 2490 bp, Homo sapiens
  CDS (1)...(2490)
atgcaggaagcaatcattctcctggctctcctgggtgccatgtcagggggagaagcactacacctaatcctcttacctgctacaggcaatgtggcagagaattctccacctgggacttcagtgcacaagttttctgtgaagttatcagcatcattgtcacctgtgatcccaggatttccccagatagtcaactcaaatcccctcactgaagcttttaggatttatgtgaaggatgaggttggtgtcacagaccttcaagtcctgactgtccaggtaacagatgtgaacgagccacctcagtttcaaggcaacttggcagaaggtctacacctctacatagtagaaagagcaaaccctggattcatttaccaggttgaggccttcgatccagaagacacaagccgaaacattcccctcagttatttcctgatttctcccccaaagagcttcagaatgtctgctaatggcaccctcttctccacaacagaattggactttgaagcaggacacagaagtttccatctcatcgtggaggtgagggacagtggaggcctcaaagcctccacagagctccaggtgaacatcgtgaacctcaacgacgaagtccctcgctttaccagcccgacacgagtgtacacagtcctggaggaactgagtccaggaaccatcgtggccaatatcacagcggaggatcctgatgatgaaggttttcccagccacctcctctacagcattaccactgttagcaaatatttcatgataaatcagttgactggtacaatccaagtggcccaaaggatagaccgagatgcaggtgaattgagacaaaatcccaccatttccctggaagttctagtgaaggacagaccatatgggggtcaggagaatcgcatccagataaccttcattgtggaagacgtcaacgacaatcctgccacatgccaaaagttcaccttcagtgaggcaccaaacaacagattcaacttcaccatgccatctggagtggggagcggcagcagatttttacaggatccagctggctctgggaagattgtgctgattggtgatctagactacgaaaatccaagtaacctagcagccggcaataaatatacggtgataatccaggtgcaggatgtggcccccccttactataaaaataacgtctacgtttatatcctaacaagcccagaaaatgagtttcctctcatttttgataggccatcctatgtatttgatgtgtcagaaagaaggcccgccagaacccgagtgggacaggtgcgagccactgataaagacctcccccagagcagcctcctgtactccatctccactggaggggccagcctccagtatccaaatgtattttggattaatcccaagacaggagaactccagctggtaactaaagtggactgtgaaacaacccccatctatattctcagaatccaggccaccaacaacgaagacacaagctctgtcactgttactgtgaacatccttgaagaaaatgatgaaaagccaatttgtactccaaactcttatttcctggccctcccagtggatctgaaagttggcacaaatattcagaatttcaagctgacatgtaccgaccttgattccagccccagatctttccgttattccattggcccaggtaacgtcaacaatcatttcaccttctctcccaatgctggttccaatgtcacacgcctgctgcttacatctcgctttgactatgctggtgggtttgataagatctgggactacaagctacttgtctacgtaactgatgacaacttgatgtctgacaggaagaaagcggaggctcttgttgagacaggaacagtgacactgagtattaaagtcattccccacccaaccactatcatcaccacgacccccaggcccagggtcacctatcaggtcctgaggaaaaacgtttactctccatctgcatggtacgtgccgtttgtcatcactttgggctccatattgcttctgggtctcctcgtgtacctggtcgtcctattggccaaagccatccacagacactgcccctgcaagactgggaagaacaaggaacctctgacaaagaaaggagaaacgaagactgcagagagagacgtcgtggtggaaactatccagatgaacactatctttgatggagaagccatagatccagtgaccggggaaacatatgaattcaactcaaaaactggagccagaaagtggaaagatccactaacccaaatgccaaaatggaaagagtccagccaccagggagctgccccacgcagagtcactgctggggaagggatggggtcactgagaagtgccaactgggaagaagatgagctgagtggcaaagcgtgggctgaggatgctggtctgggttccagaaatgaggttggcaagctgggcaacccaaagaacagaaatccagccttcatgaacagggcttaccccaaaccacacccaggaaagtaa

SEQ ID NO: 254 - protein, 829 aa, Homo sapiens
MQEAIILLALLGAMSGGEALHLILLPATGNVAENSPPGTSVHKFSVKLSASLSPVIPGFPQIVNSNPLTEAFRIYVKDEVGVTDLQVLTVQVTDVNEPPQFQGNLAEGLHLYIVERANPGFIYQVEAFDPEDTSRNIPLSYFLISPPKSFRMSANGTLFSTTELDFEAGHRSFHLIVEVRDSGGLKASTELQVNIVNLNDEVPRFTSPTRVYTVLEELSPGTIVANITAEDPDDEGFPSHLLYSITTVSKYFMINQLTGTIQVAQRIDRDAGELRQNPTISLEVLVKDRPYGGQENRIQITFIVEDVNDNPATCQKFTFSEAPNNRFNFTMPSGVGSGSRFLQDPAGSGKIVLIGDLDYENPSNLAAGNKYTVIIQVQDVAPPYYKNNVYVYILTSPENEFPLIFDRPSYVFDVSERRPARTRVGQVRATDKDLPQSSLLYSISTGGASLQYPNVFWINPKTGELQLVTKVDCETTPIYILRIQATNNEDTSSVTVTVNILEENDEKPICTPNSYFLALPVDLKVGTNIQNFKLTCTDLDSSPRSFRYSIGPGNVNNHFTFSPNAGSNVTRLLLTSRFDYAGGFDKIWDYKLLVYVTDDNLMSDRKKAEALVETGTVTLSIKVIPHPTTIITTTPRPRVTYQVLRKNVYSPSAWYVPFVITLGSILLLGLLVYLVVLLAKAIHRHCPCKTGKNKEPLTKKGETKTAERDVVVETIQMNTIFDGEAIDPVTGETYEFNSKTGARKWKDPLTQMPKWKESSHQGAAPRRVTAGEGMGSLRSANWEEDELSGKAWAEDAGLGSRNEVGKLGNPKNRNPAFMNRAYPKPHPGK

SEQ ID NO: 255 - DNA, 1767 bp, Homo sapiens
  CDS (1)...(1767)
atgcaggaagcaatcattctcctggctctcctgggtgccatgtcagtgactggtacaatccaagtggcccaaaggatagaccgagatgcaggtgaattgagacaaaatcccaccatttccctggaagttctagtgaaggacagaccatatgggggtcaggagaatcgcatccagataaccttcattgtggaagacgtcaacgacaatcctgccacatgccaaaagttcaccttcagtgaggcaccaaacaacagattcaacttcaccatgccatctggagtggggagcggcagcagatttttacaggatccagctggctctgggaagattgtgctgattggtgatctagactacgaaaatccaagtaacctagcagccggcaataaatatacggtgataatccaggtgcaggatgtggcccccccttactataaaaataacgtctacgtttatatcctaacaagcccagaaaatgagtttcctctcatttttgataggccatcctatgtatttgatgtgtcagaaagaaggcccgccagaacccgagtgggacaggtgcgagccactgataaagacctcccccagagcagcctcctgtactccatctccactggaggggccagcctccagtatccaaatgtattttggattaatcccaagacaggagaactccagctggtaactaaagtggactgtgaaacaacccccatctatattctcagaatccaggccaccaacaacgaagacacaagctctgtcactgttactgtgaacatccttgaagaaaatgatgaaaagccaatttgtactccaaactcttatttcctggccctcccagtggatctgaaagttggcacaaatattcagaatttcaagctgacatgtaccgaccttgattccagccccagatctttccgttattccattggcccaggtaacgtcaacaatcatttcaccttctctcccaatgctggttccaatgtcacacgcctgctgcttacatctcgctttgactatgctggtgggtttgataagatctgggactacaagctacttgtctacgtaactgatgacaacttgatgtctgacaggaagaaagcggaggctcttgttgagacaggaacagtgacactgagtattaaagtcattccccacccaaccactatcatcaccacgacccccaggcccagggtcacctatcaggtcctgaggaaaaacgtttactctccatctgcatggtacgtgccgtttgtcatcactttgggctccatattgcttctgggtctcctcgtgtacctggtcgtcctattggccaaagccatccacagacactgcccctgcaagactgggaagaacaaggaacctctgacaaagaaaggagaaacgaagactgcagagagagacgtcgtggtggaaactatccagatgaacactatctttgatggagaagccatagatccagtgaccggggaaacatatgaattcaactcaaaaactggagccagaaagtggaaagatccactaacccaaatgccaaaatggaaagagtccagccaccagggagctgccccacgcagagtcactgctggggaagggatggggtcactgagaagtgccaactgggaagaagatgagctgagtggcaaagcgtgggctgaggatgctggtctgggttccagaaatgaggttggcaagctgggcaacccaaagaacagaaatccagccttcatgaacagggcttaccccaaaccacacccaggaaagtaa

SEQ ID NO: 256 - protein, 588 aa, Homo sapiens
MQEAIILLALLGAMSVTGTIQVAQRIDRDAGELRQNPTISLEVLVKDRPYGGQENRIQITFIVEDVNDNPATCQKFTFSEAPNNRFNFTMPSGVGSGSRFLQDPAGSGKIVLIGDLDYENPSNLAAGNKYTVIIQVQDVAPPYYKNNVYVYILTSPENEFPLIFDRPSYVFDVSERRPARTRVGQVRATDKDLPQSSLLYSISTGGASLQYPNVFWINPKTGELQLVTKVDCETTPIYILRIQATNNEDTSSVTVTVNILEENDEKPICTPNSYFLALPVDLKVGTNIQNFKLTCTDLDSSPRSFRYSIGPGNVNNHFTFSPNAGSNVTRLLLTSRFDYAGGFDKIWDYKLLVYVTDDNLMSDRKKAEALVETGTVTLSIKVIPHPTTIITTTPRPRVTYQVLRKNVYSPSAWYVPFVITLGSILLLGLLVYLVVLLAKAIHRHCPCKTGKNKEPLTKKGETKTAERDVVVETIQMNTIFDGEAIDPVTGETYEFNSKTGARKWKDPLTQMPKWKESSHQGAAPRRVTAGEGMGSLRSANWEEDELSGKAWAEDAGLGSRNEVGKLGNPKNRNPAFMNRAYPKPHPGK

SEQ ID NO: 257 - DNA, 1332 bp, Homo sapiens
  CDS (1)...(1332)
atgcaggaagcaatcattctcctggctctcctgggtgccatgtcagggggagaagcactacacctaatcctcttacctgctacaggcaatgtggcagagaattctccacctgggacttcagtgcacaagttttctgtgaagttatcagcatcattgtcacctgtgatcccaggatttccccagatagtcaactcaaatcccctcactgaagcttttaggatttatgtgaaggatgaggttggtgtcacagaccttcaagtcctgactgtccaggtaacagatgtgaacgagccacctcagtttcaaggcaacttggcagaaggtctacacctctacatagtagaaagagcaaaccctggattcatttaccaggttgaggccttcgatccagaagacacaagccgaaacattcccctcagttatttcctgatttctcccccaaagagcttcagaatgtctgctaatggcaccctcttctccacaacagaattggactttgaagcaggacacagaagtttccatctcatcgtggaggtgagggacagtggaggcctcaaagcctccacagagctccaggtgaacatcgtgaacctcaacgacgaagtccctcgctttaccagcccgacacgagtgtacacagtcctggaggaactgagtccaggaaccatcgtggccaatatcacagcggaggatcctgatgatgaaggttttcccagccacctcctctacagcattaccactgttagcaaatatttcatgataaatcagttgactggtacaatccaagtggcccaaaggatagaccgagatgcaggtgaattgagacaaaatcccaccatttccctggaagttctagtgaaggacagaccatatgggggtcaggagaatcgcatccagataaccttcattgtggaagacgtcaacgacaatcctgccacatgccaaaagttcaccttcaggtatgcacactttgaaagttgggctggacattctatctctttggtggccctctgcccttctgcttctctggtatattctcaggagaattataagcatttggagaaacagctcagtagaataaatcgatgtgaactgttcactgttgtccacaggtttccttgttatcatccttttttcttccctctctttcattttccttcttcattatctcccttgttcactttcttactcttaagaattattttttattttgctcccttctatatctggctcatctctgttggtgaaaaggaccacagggacttgttaggccctccctggactgtgcctgttctttgtttattgccacgggtggcaagatggggctgttag

SEQ ID NO: 258 - protein, 443 aa, Homo sapiens
MQEAIILLALLGAMSGGEALHLILLPATGNVAENSPPGTSVHKFSVKLSASLSPVIPGFPQIVNSNPLTEAFRIYVKDEVGVTDLQVLTVQVTDVNEPPQFQGNLAEGLHLYIVERANPGFIYQVEAFDPEDTSRNIPLSYFLISPPKSFRMSANGTLFSTTELDFEAGHRSFHLIVEVRDSGGLKASTELQVNIVNLNDEVPRFTSPTRVYTVLEELSPGTIVANITAEDPDDEGFPSHLLYSITTVSKYFMINQLTGTIQVAQRIDRDAGELRQNPTISLEVLVKDRPYGGQENRIQITFIVEDVNDNPATCQKFTFRYAHFESWAGHSISLVALCPSASLVYSQENYKHLEKQLSRINRCELFTVVHRFPCYHPFFFPLFHFPSSLSPLFTFLLLRIIFYFAPFYIWLISVGEKDHRDLLGPPWTVPVLCLLPRVARWGC

SEQ ID NO: 259 - DNA, 1989 bp, Homo sapiens
  CDS (1)...(1989)
atgcaggaagcaatcattctcctggctctcctgggtgccatgtcagggggagaagcactacacctaatcctcttacctgctacaggcaatgtggcagagaattctccacctgggacttcagtgcacaagttttctgtgaagttatcagcatcattgtcacctgtgatcccaggatttccccagatagtcaactcaaatcccctcactgaagcttttaggatttatgtgaaggatgaggttggtgtcacagaccttcaagtcctgactgtccaggtaacagatgtgaacgagccacctcagtttcaaggcaacttggcagaaggtctacacctctacatagtagaaagagcaaaccctggattcatttaccaggttgaggccttcgatccagaagacacaagccgaaacattcccctcagttatttcctgatttctcccccaaagagcttcagaatgtctgctaatggcaccctcttctccacaacagaattggactttgaagcaggacacagaagtttccatctcatcgtggaggtgagggacagtggaggcctcaaagcctccacagagctccaggtgaacatcgtgaacctcaacgacgaagtccctcgctttaccagcccgacacgagtgtacacagtcctggaggaactgagtccaggaaccatcgtggccaatatcacagcggaggatcctgatgatgaaggttttcccagccacctcctctacagcattaccactgttagcaaatatttcatgataaatcagttgactggtacaatccaagtggcccaaaggatagaccgagatgcaggtgaattgagacaaaatcccaccatttccctggaagttctagtgaaggacagaccatatgggggtcaggagaatcgcatccagataaccttcattgtggaagacgtcaacgacaatcctgccacatgccaaaagttcaccttcagcattatggtgccggaaagaacagccaaggggacgttgcttcttgacctaaacaagttctgctttgatgatgacagtgaggcaccaaacaacagattcaacttcaccatgccatctggagtggggagcggcagcagatttttacaggatccagctggctctgggaagattgtgctgattggtgatctagactacgaaaatccaagtaacctagcagccggcaataaatatacggtgataatccaggtgcaggatgtggcccccccttactataaaaataacgtctacgtttatatcctaacaagcccagaaaatgagtttcctctcatttttgataggccatcctatgtatttgatgtgtcagaaagaaggcccgccagaacccgagtgggacaggtgcgagccactgataaagacctcccccagagcagcctcctgtactccatctccactggaggggccagcctccagtatccaaatgtattttggattaatcccaagacaggagaactccagctggtaactaaagtggactgtgaaacaacccccatctatattctcagaatccaggccaccaacaacgaagacacaagctctgtcactgttactgtgaacatccttgaagaaaatgatgaaaagccaatttgtactccaaactcttatttcctggccctcccagtggatctgaaagttggcacaaatattcagaatttcaagctgacatgtaccgaccttgattccagccccagatctttccgttattccattggcccagcccagggtcacctatcaggtcctgaggaaaaacgtttactctccatctgcatggtacgtgccgtttgtcatcactttgggctccatattgcttctgggtctcctcgtgtacctggtcgtcctattggccaaagccatccacagacactgcccctgcaagactgggaagaacaaggaacctctgacaaagaaaggagaaacgaagactgcagagagagacgtcgtggtggaaactatccagatgaacactatctttga

SEQ ID NO: 260 - protein, 662 aa, Homo sapiens
MQEAIILLALLGAMSGGEALHLILLPATGNVAENSPPGTSVHKFSVKLSASLSPVIPGFPQIVNSNPLTEAFRIYVKDEVGVTDLQVLTVQVTDVNEPPQFQGNLAEGLHLYIVERANPGFIYQVEAFDPEDTSRNIPLSYFLISPPKSFRMSANGTLFSTTELDFEAGHRSFHLIVEVRDSGGLKASTELQVNIVNLNDEVPRFTSPTRVYTVLEELSPGTIVANITAEDPDDEGFPSHLLYSITTVSKYFMINQLTGTIQVAQRIDRDAGELRQNPTISLEVLVKDRPYGGQENRIQITFIVEDVNDNPATCQKFTFSIMVPERTAKGTLLLDLNKFCFDDDSEAPNNRFNFTMPSGVGSGSRFLQDPAGSGKIVLIGDLDYENPSNLAAGNKYTVIIQVQDVAPPYYKNNVYVYILTSPENEFPLIFDRPSYVFDVSERRPARTRVGQVRATDKDLPQSSLLYSISTGGASLQYPNVFWINPKTGELQLVTKVDCETTPIYILRIQATNNEDTSSVTVTVNILEENDEKPICTPNSYFLALPVDLKVGTNIQNFKLTCTDLDSSPRSFRYSIGPAQGHLSGPEEKRLLSICMVRAVCHHFGLHIASGSPRVPGRPIGQSHPQTLPLQDWEEQGTSDKERRNEDCRERRRGGNYPDEHYL

SEQ ID NO: 261 - DNA, 2007 bp, Homo sapiens
  CDS (1)...(2007)
atgcaggaagcaatcattctcctggctctcctgggtgccatgtcagggggagaagcactacacctaatcctcttacctgctacaggcaatgtggcagagaattctccacctgggacttcagtgcacaagttttctgtgaagttatcagcatcattgtcacctgtgatcccaggatttccccagatagtcaactcaaatcccctcactgaagcttttagggtgaattggctgtcaggcacctactttgaggttgtcaccactgggatggaacaactagattttgaaacaggaccaaacatatttgatttgcagatttatgtgaaggatgaggttggtgtcacagaccttcaagtcctgactgtccaggtaacagatgtgaacgagccacctcagtttcaaggcaacttggcagaaggtctacacctctacatagtagaaagagcaaaccctggattcatttaccaggttgaggccttcgatccagaagacacaagccgaaacattcccctcagttatttcctgatttctcccccaaagagcttcagaatgtctgctaatggcaccctcttctccacaacagaattggactttgaagcaggacacagaagtttccatctcatcgtggaggtgagggacagtggaggcctcaaagcctccacagagctccaggtgaacatcgtgaacctcaacgacgaagtccctcgctttaccagcccgacacgagtgtacacagtcctggaggaactgagtccaggaaccatcgtggccaatatcacagcggaggatcctgatgatgaaggttttcccagccacctcctctacagcattaccactgttagcaaatatttcatgataaatcagttgactggtacaatccaagtggcccaaaggatagaccgagatgcaggtgaattgagacaaaatcccaccatttccctggaagttctagtgaaggacagaccatatgggggtcaggagaatcgcatccagataaccttcattgtggaagacgtcaacgacaatcctgccacatgccaaaagttcaccttcagtgaggcaccaaacaacagattcaacttcaccatgccatctggagtggggagcggcagcagatttttacaggatccagctggctctgggaagattgtgctgattggtgatctagactacgaaaatccaagtaacctagcagccggcaataaatatacggtgataatccaggtgcaggatgtggcccccccttactataaaaataacgtctacgtttatatcctaacaagcccagaaaatgagtttcctctcatttttgataggccatcctatgtatttgatgtgtcagaaagaaggcccgccagaacccgagtgggacaggtgcgagccactgataaagacctcccccagagcagcctcctgtactccatctccactggaggggccagcctccagtatccaaatgtattttggattaatcccaagacaggagaactccagctggtaactaaagtggactgtgaaacaacccccatctatattctcagaatccaggccaccaacaacgaagacacaagctctgtcactgttactgtgaacatccttgaagaaaatgatgaaaagccaatttgtactccaaactcttatttcctggccctcccagtggatctgaaagttggcacaaatattcagaatttcaagctgacatgtaccgaccttgattccagccccagatctttccgttattccattggcccagcccagggtcacctatcaggtcctgaggaaaaacgtttactctccatctgcatggtacgtgccgtttgtcatcactttgggctccatattgcttctgggtctcctcgtgtacctggtcgtcctattggccaaagccatccacagacactgcccctgcaagactgggaagaacaaggaacctctgacaaagaaaggagaaacgaagactgcagagagagacgtcgtggtggaaactatccagatgaacactatctttga

SEQ ID NO: 262 - protein, 668 aa, Homo sapiens
MQEAIILLALLGAMSGGEALHLILLPATGNVAENSPPGTSVHKFSVKLSASLSPVIPGFPQIVNSNPLTEAFRVNWLSGTYFEVVTTGMEQLDFETGPNIFDLQIYVKDEVGVTDLQVLTVQVTDVNEPPQFQGNLAEGLHLYIVERANPGFIYQVEAFDPEDTSRNIPLSYFLISPPKSFRMSANGTLFSTTELDFEAGHRSFHLIVEVRDSGGLKASTELQVNIVNLNDEVPRFTSPTRVYTVLEELSPGTIVANITAEDPDDEGFPSHLLYSITTVSKYFMINQLTGTIQVAQRIDRDAGELRQNPTISLEVLVKDRPYGGQENRIQITFIVEDVNDNPATCQKFTFSEAPNNRFNFTMPSGVGSGSRFLQDPAGSGKIVLIGDLDYENPSNLAAGNKYTVIIQVQDVAPPYYKNNVYVYILTSPENEFPLIFDRPSYVFDVSERRPARTRVGQVRATDKDLPQSSLLYSISTGGASLQYPNVFWINPKTGELQLVTKVDCETTPIYILRIQATNNEDTSSVTVTVNILEENDEKPICTPNSYFLALPVDLKVGTNIQNFKLTCTDLDSSPRSFRYSIGPAQGHLSGPEEKRLLSICMVRAVCHHFGLHIASGSPRVPGRPIGQSHPQTLPLQDWEEQGTSDKERRNEDCRERRRGGNYPDEHYL

SEQ ID NO: 263 - DNA, 9108 bp, Homo sapiens
  CDS (1)...(9108)
atgggacacctgtggctcctgggtatttggggcctctgtgggctgctcctgtgtgccgcggatcccagcacagatggctctcaaataatccccaaagtcacagaaataatacctaaatatggcagtataaatggagcaacaaggctgactataagaggagaaggtttttctcaagcaaaccagtttaactatggagttgataacgctgagttgggaaacagtgtgcaattaatttcttctttccagtcaattacttgtgatgtagaaaaagatgcaagtcattcaactcaaattacatgctatactagagcaatgccggaagattcctacactgttagagtcagtgtggacggggttcctgttacggaaaataacacctgcaaaggtcacatcaacagctgggaatgtaccttcaacgcaaaaagttttagaaccccaacaataagaagcatcacacctttatctggaactccaggtacactaataacaatccaaggcagaatcttcactgatgtctatggaagtaatattgcactaagctcaaatgggaaaaatgttaggattttgagagtttacattggaggaatgccctgtgagcttctcataccacaatctgataatttatatggtctaaaactggatcatccaaatggagatatgggttctatggtttgtaagacgactggaacttttattggtcatcacaatgtcagcttcatcttagataatgattatgggaggagttttccacagaaaatggcatattttgtttcttctctcaataaaattgcaatgtttcaaacatatgcagaggtcaccatgattttcccttcacaaggaagcattcgaggtggcaccacgctgacaataagtgggcgtttctttgatcagacagatttccccgtcagagttctagttggaggtgaaccttgtgatattttgaatgtcacagaaaatagtatatgttgcaagacaccccccaaacctcatattctcaaaactgtatatccaggagggagaggcctgaagcttgaggtgtggaataatagccgtccaatacgtttggaagagatactggaatacaatgaaaaaacgcctgggtacatgggtgccagttgggtagattcagcttcctatatttggctcatggaacaagacacatttgttgcacgctttagtggatttttggtggctccagattctgatgtttatagattctacatcaaaggtgatgaccgttatgctatttattttagccagactggacttccagaagataaggtgaggattgcatatcattctgctaatgccaacagttatttttccagtccaacacaaagatcagatgatattcatctgcagaaaggaaaagaatactatattgaaatcttgctgcaggagtatagattaagtgcatttgttgatgttggactgtaccagtatcgaaatgtttatactgaacaacaaacaggagatgcagtgaatgaagaacaagttatcaaatcccagtcgacaatcctccaggaagtacaggttataacattggaaaactgggaaacaactaatgcaattaatgaggttcagaagatcaaggtaaccagcccatgtgtggaagctaattcatgttcactttaccaatatagattaatctataatatggaaaaaactgtcttcctacctgctgatgcttctgaattcatactgcaatcagccttgaatgacctctggtctataaaaccggacacagttcaagtaataagaacacaaaatccccagagctatgtctacatggtaacattcatatcaactagaggagactttgatctgcttggttatgaagtagttgaagggaataatgtcacactggatattacagaacaaaccaaaggaaaacccaacttggagacattcacactgaattgggatgggatcgcttctaagccactcactctatggtcatcagaagctgaagttcagggagcagtggaagaaatggttagcactaagtgtccaccacaaattgcaaattttgaagaaggatttgttgtgaaatatttcagagactatgaaactgattttaatctggaacatattaacagagggcagaagacagctgaaaccgatgcttactgtggtcgttattccctgaaaaacccagctgttctttttgactcagcagatgttaaaccaaacagacgaccatatggagatattttattgtttccttataatcagttatgtttagcatacaaaggattcctggcaaattatattggtctaaaatttcagtaccaagacaatagcaagattactagaagcactgatacacagtttacatacaactttgcttatggaaacaactggacttacacttgcatagaccttctggatctcgtaagaacgaaatacactgggacaaatgtttctcttcagaggattagcttacataaagcatcagaatcacagtccttctatgtggatgtagtgtacattggacacacatctacaatctcaacattggatgaaatgcccaagagaagacttcctgcattagcaaataaaggaatattcttagagcactttcaggtgaatcagaccaaaacaaatgggccaactatgacaaaccaatattctgttaccatgacttcatacaattgcagttacaatatacccatgatggctgtgagctttgggcagataatcacacatgagacagagaacgagtttgtctacagaggaaataattggccaggcgagtcaaaaattcgtattcaaagaattcaagctgcatctccacctctaagtggcagctttgacattcaagcttatggacatattcttaaaggcctccccgctgctgtgtcagctgcagatctgcagtttgcactccagagtctggagggaatgggaagaatctcagttacacgagagggaacctgtgctggctacgcgtggaacatcaaatggagaagcacctgcggaaagcagaatcttctacagattaatgattccaacattattggagaaaaggctaatatgacagttacaaggataaaggaaggtggcttattcagacaacatgtacttggagacctacttcgtacacccagtcaacagccacaggttgaagtctatgtcaatggaattccagctaaatgttcaggtgactgtggatttacatgggattccaacattactcccctagtcttggcgataagcccttctcaagggtcctatgaagaaggcacaattctaaccatagtgggttctggattttctcctagttcagctgtaacagtctcagttggaccagtaggttgttctcttctttctgtggatgaaaaagagctcaagtgccagattctgaatggaagtgctggacatgcccccgttgctgtgtccatggctgatgttggactagcacagaatgtagggggtgaagagttctactttgtttatcagagtcagatctcacatatctggcctgattctggaagcatagcaggtggtactctactgactttatctggatttggctttaatgaaaattcaaaggtattagttggaaatgaagcctgcaatgtgattgaaggggatttgaataggataacctgcaggacaccaaaaaaaactgagggtacagttgatatttcagttactaccaatggatttcaagccacagcaagggatgcttttagttataattgtttacagacaccaattataactgattttagtccaaaagtacgaacaatactaggagaagttaatttaacaattaagggctataattttggaaatgaactcacacaaaacatggcggtgtatgttggaggaaaaacctgccagattcttcactggaacttcacagatattagatgccttttgcccaagttgtctcctggaaaacatgatatctatgtagaagtcagaaactggggttttgcatcaacaagagacaaattaaattcttcaatacagtatgttttagaagtgaccagcatgtttccacaaagaggctccttgtttggtggaactgaaatcaccataaggggttttggattcagcacaataccagctgagaataccgtgctgttagggtccatcccttgcaatgttacatcatcatcagaaaatgtcataaaatgtattcttcattcaactgggaatatattcaggattaccaacaatgggaaagattcagtacatggattaggttatgcctggtcaccaccagtcctaaatgtgtctgtgggggacacagtggcatggcattggcaaacacatccgtttcttagagggataggatataggattttttctgtctccagtcctggaagtgtaatttatgatggcaaaggattcacaagtggaagacaaaaatctacatcaggttcattttcttaccaatttacttctcctggaatccattattatagcagcgggtatgttgatgaggctcactccatttttctccaaggagtcattaatgttttaccagctgaaaccagacacattcccttgcacctgtttgtgggtagctctgaagccacatatgcttatggaggacctgagaatttgcacttgggaagctctgtggcaggctgcctagcaacagaacccctgtgcagcctgaacaataccagggttaaaaattcaaaaagattgctatttgaggtttcaagttgtttttcaccatctataagcaacattactccgtccactggaacagtaaatgaactaataacaattattggacatggctttagtaatctcccatgggctaataaggttacaattggtagctacccctgtgtcgtagaagaaagtagtgaggattcaattacatgtcatattgaccctcaaaactcaatggatgttggtatcagggaaactgtcactttgactgtctacaacctgggcactgctatcaatacgttgtccaatgaatttgataggcgatttgtacttttgccaaacattgacctggtgttgccaaatgcaggatcaactacaggaatgacaagcgtgaccataaaaggctctggatttgccgtttcttctgcaggtgtaaaagtccttatgggtcatttcccatgtaaagttctatcagtgaattatacggccattgaatgtgaaacatcccctgctgcccaacagcttgtggatgtagatcttctaatacatggagtgcctgcccagtgccagggaaactgcaccttttcatacttagaaagcatcactccttacataacaggagtcttcccaaactctgtcataggatctgtaaaagttcttattgaaggagaaggtttggggactgttttggaggacattgctgttttcattggaaatcaacagttcagagcaatagaggttaatgaaaacaacatcactgctcttgtgactcctctcccagttggacatcattctgttagtgttgtggtgggaagtaaaggcttggctctgggaaacctgactgtcagcagccccccagtagcatctctatcaccaacttctggaagcattggtggtggaactacactggtgatcacaggaaatggcttctatccaggcaacactacagtcactattggggatgaaccttgtcaaattatttccatcaaccccaatgaagtctactgccgcactcccgctgggaccactggaatggtcgatgttaaaatctttgttaatacaattgcttatccacctttgctttttacatatgccctggaggatactccatttctcagaggaattatcccaagcagaggtccaccaggaactgaaattgagatcactggatccaactttggctttgagatcttggaaatctccgtgatgataaataacattcagtgtaatgtaaccatggccaatgatagtgtgttgcagtgcatcgtgggagatcatgctgggggcacatttcctgttatgatgcatcataagacaaaaggctcagccatgtccacagttgtatttgagtacccgcttaatattcaaaatattaatccaagccaagggagctttggtgggggtcaaaccatgactgtgacaggcaccggatttaatccacaaaattcaattatattagtttgtggctcagaatgtgcaattgacaggcttagatctgattacacaacactattatgtgaaattccatctaataatggcacgggagctgagcaagcctgtgaagtgagtgtggttaatgggaaagatttgtcacagtccatgactccgtttacgtacgcagtgtcactgactccactcatcactgcagtatctcctaagagaggcagtacagcagggggcaccagactgacagtcgtgggatcaggattcagtgaaaatatggaggatgttcatatcaccatagctgaagccaaatgtgatgttgagtattccaacaagacacacatcatctgcatgacagatgcccatactctatcagggtgggctccagtttgtgtccacatcagaggtgtcggcatggccaaactggataatgctgactttctttatgttgatgcctggtcctccaatttctcatgggggggaaaatctcccccagaagaaggatctcttgttgttattacaaaaggacagaccattctcctggatcaaagcacccctattttgaaaatgttgcttattcagggtgggactctaatatttgatgaagctgacattgaactccaggcagaaaatattctaattacagatggaggtgttcttcagattggaacagagacatccccattccaacacaaggctgtcattaccttgcatggtcacctgcgatctcctgagctccctgtctatggtgccaaaacactggctgtgcgggagggaatcctggatctgcacggtgtgcctgttcctgtgacctggactcgcttggctcatactgcaaaggcaggggaaagaattttaattttacaagaagcagtaacatggaaaccaggagataacattgtaattgcaagcacaggacacagacacagtcaaggagagaatgaaaaaatgaccattgcatctgtgtctgctgatggcataaacataacactaagtaacccactaaattacacacacttaggaattacggtcacactccctgatggaactctgtttgaagcaagagcagaagttggaattcttacaagaaatattttaataagaggatctgataatgttgagtggaataacaaaattcctgcatgtcctgatggatttgacacaggagaatttgctacacagacctgtctccaaggaaagtttggagaagaaataggaagtgaccaatttggaggctgcgttatgtttcatgctcctgtacctggtgctaacatggtaactgggagaatagaatatgtagaggtattccatgctggccaggctttccggttggggcgatatccaatacattggcacctgcttggagacttacagtttaaatcttatgtaagaggctgtgcaattcaccaggcctataacagagctgttactattcataacacacaccatcttctggttgagaggaatattatatatgatattaagggaggagcattttttatagaagatggtattgaacatggcaatatcctccagtataacttggcagtatttgtacagcaaagtaccagtcttctgaatgatgatgtgaccccggctgcattttgggtcaccaacccgaacaataccatacgacacaatgctgttgctggtggcactcactttggcttttggtaccggatgaacaaccaccctgatgggccatcctatgacagaaacatttgtcaaaaaagagttccccttggcgaattttttaacaatactgtccattctcaaggttggtttggaatgtggatctttgaggaatatttccccatgcaaacgggatcttgtacatctacagtgcctgcgcctgcaatatttaactcacttactacttggaattgtcaaaaaggagctgaatgggtcaatggaggtgcccttcagttccataactttgtgatggtgaataactatgaggctggaattgagactaagaggatcctggctccttatgttggagggtggggtgaaaccaatggagcggtgattaaaaatgccaaaatagtcggccatcttgatgaactgggaatggggtctgcattttgcacagcaaaaggcctggttctcccatttagtgaaggcttgactgtctcttctgtgcactttatgaactttgaccgtcccaactgtgtagctttgggagtgacatccatctctggagtttgtaatgacagatgtgggggttggagtgcaaagtttgttgacgtccagtattctcacacaccgaacaaggctggctttcgctgggaacatgaaatggtaatgattgatgttgatggctcacttacagggcacaaaggacataccgtcattccacacagctcattgctagacccttctcattgtactcaggaagctgagtggagcattgggttccctggatcagtctgtgatgcttcagtcagctttcaccgtttagcgttcaaccagccttctccagtatctctgcttgaaaaggatgtggttctttcagactcttttggcacaagcattattccatttcagaagaaacgactgactcatatgtctggatggatggctctgattccaaatgcaaatcacattaactggtattttaaaggtgtggatcacataaccaacatttcatatacatcgacattctatggattcaaggaagaagactatgtaattatatcacataacttcactcaaaatcctgacatgtttaatattattgatatgaggaatggttcctcaaatccattgaattggaatactagcaagaatggggactggcaccttgaagcaaacactagtactctatattacttggtgtcaggaagaaatgaccttcatcagagtcagctcatttctgggaacctggatcctgatgtgaaagacgttgttattaatttccaagcttactgttgtattctccaggattgctttcctgtacatccgccatcaagaaaaccaattcccaagaagcgaccagccacttataagtacataggccttttgtag

SEQ ID NO: 264 - protein, 3035 aa, Homo sapiens
MGHLWLLGIWGLCGLLLCAADPSTDGSQIIPKVTEIIPKYGSINGATRLTIRGEGFSQANQFNYGVDNAELGNSVQLISSFQSITCDVEKDASHSTQITCYTRAMPEDSYTVRVSVDGVPVTENNTCKGHINSWECTFNAKSFRTPTIRSITPLSGTPGTLITIQGRIFTDVYGSNIALSSNGKNVRILRVYIGGMPCELLIPQSDNLYGLKLDHPNGDMGSMVCKTTGTFIGHHNVSFILDNDYGRSFPQKMAYFVSSLNKIAMFQTYAEVTMIFPSQGSIRGGTTLTISGRFFDQTDFPVRVLVGGEPCDILNVTENSICCKTPPKPHILKTVYPGGRGLKLEVWNNSRPIRLEEILEYNEKTPGYMGASWVDSASYIWLMEQDTFVARFSGFLVAPDSDVYRFYIKGDDRYAIYFSQTGLPEDKVRIAYHSANANSYFSSPTQRSDDIHLQKGKEYYIEILLQEYRLSAFVDVGLYQYRNVYTEQQTGDAVNEEQVIKSQSTILQEVQVITLENWETTNAINEVQKIKVTSPCVEANSCSLYQYRLIYNMEKTVFLPADASEFILQSALNDLWSIKPDTVQVIRTQNPQSYVYMVTFISTRGDFDLLGYEVVEGNNVTLDITEQTKGKPNLETFTLNWDGIASKPLTLWSSEAEVQGAVEEMVSTKCPPQIANFEEGFVVKYFRDYETDFNLEHINRGQKTAETDAYCGRYSLKNPAVLFDSADVKPNRRPYGDILLFPYNQLCLAYKGFLANYIGLKFQYQDNSKITRSTDTQFTYNFAYGNNWTYTCIDLLDLVRTKYTGTNVSLQRISLHKASESQSFYVDVVYIGHTSTISTLDEMPKRRLPALANKGIFLEHFQVNQTKTNGPTMTNQYSVTMTSYNCSYNIPMMAVSFGQIITHETENEFVYRGNNWPGESKIRIQRIQAASPPLSGSFDIQAYGHILKGLPAAVSAADLQFALQSLEGMGRISVTREGTCAGYAWNIKWRSTCGKQNLLQINDSNIIGEKANMTVTRIKEGGLFRQHVLGDLLRTPSQQPQVEVYVNGIPAKCSGDCGFTWDSNITPLVLAISPSQGSYEEGTILTIVGSGFSPSSAVTVSVGPVGCSLLSVDEKELKCQILNGSAGHAPVAVSMADVGLAQNVGGEEFYFVYQSQISHIWPDSGSIAGGTLLTLSGFGFNENSKVLVGNEACNVIEGDLNRITCRTPKKTEGTVDISVTTNGFQATARDAFSYNCLQTPIITDFSPKVRTILGEVNLTIKGYNFGNELTQNMAVYVGGKTCQILHWNFTDIRCLLPKLSPGKHDIYVEVRNWGFASTRDKLNSSIQYVLEVTSMFPQRGSLFGGTEITIRGFGFSTIPAENTVLLGSIPCNVTSSSENVIKCILHSTGNIFRITNNGKDSVHGLGYAWSPPVLNVSVGDTVAWHWQTHPFLRGIGYRIFSVSSPGSVIYDGKGFTSGRQKSTSGSFSYQFTSPGIHYYSSGYVDEAHSIFLQGVINVLPAETRHIPLHLFVGSSEATYAYGGPENLHLGSSVAGCLATEPLCSLNNTRVKNSKRLLFEVSSCFSPSISNITPSTGTVNELITIIGHGFSNLPWANKVTIGSYPCVVEESSEDSITCHIDPQNSMDVGIRETVTLTVYNLGTAINTLSNEFDRRFVLLPNIDLVLPNAGSTTGMTSVTIKGSGFAVSSAGVKVLMGHFPCKVLSVNYTAIECETSPAAQQLVDVDLLIHGVPAQCQGNCTFSYLESITPYITGVFPNSVIGSVKVLIEGEGLGTVLEDIAVFIGNQQFRAIEVNENNITALVTPLPVGHHSVSVVVGSKGLALGNLTVSSPPVASLSPTSGSIGGGTTLVITGNGFYPGNTTVTIGDEPCQIISINPNEVYCRTPAGTTGMVDVKIFVNTIAYPPLLFTYALEDTPFLRGIIPSRGPPGTEIEITGSNFGFEILEISVMINNIQCNVTMANDSVLQCIVGDHAGGTFPVMMHHKTKGSAMSTVVFEYPLNIQNINPSQGSFGGGQTMTVTGTGFNPQNSIILVCGSECAIDRLRSDYTTLLCEIPSNNGTGAEQACEVSVVNGKDLSQSMTPFTYAVSLTPLITAVSPKRGSTAGGTRLTVVGSGFSENMEDVHITIAEAKCDVEYSNKTHIICMTDAHTLSGWAPVCVHIRGVGMAKLDNADFLYVDAWSSNFSWGGKSPPEEGSLVVITKGQTILLDQSTPILKMLLIQGGTLIFDEADIELQAENILITDGGVLQIGTETSPFQHKAVITLHGHLRSPELPVYGAKTLAVREGILDLHGVPVPVTWTRLAHTAKAGERILILQEAVTWKPGDNIVIASTGHRHSQGENEKMTIASVSADGINITLSNPLNYTHLGITVTLPDGTLFEARAEVGILTRNILIRGSDNVEWNNKIPACPDGFDTGEFATQTCLQGKFGEEIGSDQFGGCVMFHAPVPGANMVTGRIEYVEVFHAGQAFRLGRYPIHWHLLGDLQFKSYVRGCAIHQAYNRAVTIHNTHHLLVERNIIYDIKGGAFFIEDGIEHGNILQYNLAVFVQQSTSLLNDDVTPAAFWVTNPNNTIRHNAVAGGTHFGFWYRMNNHPDGPSYDRNICQKRVPLGEFFNNTVHSQGWFGMWIFEEYFPMQTGSCTSTVPAPAIFNSLTTWNCQKGAEWVNGGALQFHNFVMVNNYEAGIETKRILAPYVGGWGETNGAVIKNAKIVGHLDELGMGSAFCTAKGLVLPFSEGLTVSSVHFMNFDRPNCVALGVTSISGVCNDRCGGWSAKFVDVQYSHTPNKAGFRWEHEMVMIDVDGSLTGHKGHTVIPHSSLLDPSHCTQEAEWSIGFPGSVCDASVSFHRLAFNQPSPVSLLEKDVVLSDSFGTSIIPFQKKRLTHMSGWMALIPNANHINWYFKGVDHITNISYTSTFYGFKEEDYVIISHNFTQNPDMFNIIDMRNGSSNPLNWNTSKNGDWHLEANTSTLYYLVSGRNDLHQSQLISGNLDPDVKDVVINFQAYCCILQDCFPVHPPSRKPIPKKRPATYKYIGLL

SEQ ID NO: 265 - DNA, 6102 bp, Homo sapiens
  CDS (1)...(6102)
atgggacacctgtggctcctgggtatttggggcctctgtgggctgctcctgtgtgccgcggatcccagcacagatggctctcaaataatccccaaagtcacagaaataatacctaaatatggcagtataaatggagcaacaaggctgactataagaggagaaggtttttctcaagcaaaccagtttaactatggagttgataacgctgagttgggaaacagtgtgcaattaatttcttctttccagtcaattacttgtgatgtagaaaaagatgcaagtcattcaactcaaattacatgctatactagagcaatgccggaagattcctacactgttagagtcagtgtggacggggttcctgttacggaaaataacacctgcaaaggtcacatcaacagctgggaatgtaccttcaacgcaaaaagttttagaaccccaacaataagaagcatcacacctttatctggaactccaggtacactaataacaatccaaggcagaatcttcactgatgtctatggaagtaatattgcactaagctcaaatgggaaaaatgttaggattttgagagtttacattggaggaatgccctgtgagcttctcataccacaatctgataatttatatggtctaaaactggatcatccaaatggagatatgggttctatggtttgtaagacgactggaacttttattggtcatcacaatgtcagcttcatcttagataatgattatgggaggagttttccacagaaaatggcatattttgtttcttctctcaataaaattgcaatgtttcaaacatatgcagaggtcaccatgattttcccttcacaaggaagcattcgaggtggcaccacgctgacaataagtgggcgtttctttgatcagacagatttccccgtcagagttctagttggaggtgaaccttgtgatattttgaatgtcacagaaaatagtatatgttgcaagacaccccccaaacctcatattctcaaaactgtatatccaggagggagaggcctgaagcttgaggtgtggaataatagccgtccaatacgtttggaagagatactggaatacaatgaaaaaacgcctgggtacatgggtgccagttgggtagattcagcttcctatatttggctcatggaacaagacacatttgttgcacgctttagtggatttttggtggctccagattctgatgtttatagattctacatcaaaggtgatgaccgttatgctatttattttagccagactggacttccagaagataaggtgaggattgcatatcattctgctaatgccaacagttatttttccagtccaacacaaagatcagatgatattcatctgcagaaaggaaaagaatactatattgaaatcttgctgcaggagtatagattaagtgcatttgttgatgttggactgtaccagtatcgaaatgtttatactgaacaacaaacaggagatgcagtgaatgaagaacaagttatcaaatcccagtcgacaatcctccaggaagtacaggttataacattggaaaactgggaaacaactaatgcaattaatgaggttcagaagatcaaggtaaccagcccatgtgtggaagctaattcatgttcactttaccaatatagattaatctataatatggaaaaaactgtcttcctacctgctgatgcttctgaattcatactgcaatcagccttgaatgacctctggtctataaaaccggacacagttcaagtaataagaacacaaaatccccagagctatgtctacatggtaacattcatatcaactagaggagactttgatctgcttggttatgaagtagttgaagggaataatgtcacactggatattacagaacaaaccaaaggaaaacccaacttggagacattcacactgaattgggatgggatcgcttctaagccactcactctatggtcatcagaagctgaagttcagggagcagtggaagaaatggttagcactaagtgtccaccacaaattgcaaattttgaagaaggatttgttgtgaaatatttcagagactatgaaactgattttaatctggaacatattaacagagggcagaagacagctgaaaccgatgcttactgtggtcgttattccctgaaaaacccagctgttctttttgactcagcagatgttaaaccaaacagacgaccatatggagatattttattgtttccttataatcagttatgtttagcatacaaaggattcctggcaaattatattggtctaaaatttcagtaccaagacaatagcaagattactagaagcactgatacacagtttacatacaactttgcttatggaaacaactggacttacacttgcatagaccttctggatctcgtaagaacgaaatacactgggacaaatgtttctcttcagaggattagcttacataaagcatcagaatcacagtccttctatgtggatgtagtgtacattggacacacatctacaatctcaacattggatgaaatgcccaagagaagacttcctgcattagcaaataaaggaatattcttagagcactttcaggtgaatcagaccaaaacaaatgggccaactatgacaaaccaatattctgttaccatgacttcatacaattgcagttacaatatacccatgatggctgtgagctttgggcagataatcacacatgagacagagaacgagtttgtctacagaggaaataattggccaggcgagtcaaaaattcgtattcaaagaattcaagctgcatctccacctctaagtggcagctttgacattcaagcttatggacatattcttaaaggcctccccgctgctgtgtcagctgcagatctgcagtttgcactccagagtctggagggaatgggaagaatctcagttacacgagagggaacctgtgctggctacgcgtggaacatcaaatggagaagcacctgcggaaagcagaatcttctacagattaatgattccaacattattggagaaaaggctaatatgacagttacaaggataaaggaaggtggcttattcagacaacatgtacttggagacctacttcgtacacccagtcaacagccacaggttgaagtctatgtcaatggaattccagctaaatgttcaggtgactgtggatttacatgggattccaacattactcccctagtcttggcgataagcccttctcaagggtcctatgaagaaggcacaattctaaccatagtgggttctggattttctcctagttcagctgtaacagtctcagttggaccagtaggttgttctcttctttctgtggatgaaaaagagctcaagtgccagattctgaatggaagtgctggacatgcccccgttgctgtgtccatggctgatgttggactagcacagaatgtagggggtgaagagttctactttgtttatcagagtcagatctcacatatctggcctgattctggaagcatagcaggtggtactctactgactttatctggatttggctttaatgaaaattcaaaggtattagttggaaatgaagcctgcaatgtgattgaaggggatttgaataggataacctgcaggacaccaaaaaaaactgagggtacagttgatatttcagttactaccaatggatttcaagccacagcaagggatgcttttagttataattgtttacagacaccaattataactgattttagtccaaaagtacgaacaatactaggagaagttaatttaacaattaagggctataattttggaaatgaactcacacaaaacatggcggtgtatgttggaggaaaaacctgccagattcttcactggaacttcacagatattagatgccttttgcccaagttgtctcctggaaaacatgatatctatgtagaagtcagaaactggggttttgcatcaacaagagacaaattaaattcttcaatacagtatgttttagaagtgaccagcatgtttccacaaagaggctccttgtttggtggaactgaaatcaccataaggggttttggattcagcacaataccagctgagaataccgtgctgttagggtccatcccttgcaatgttacatcatcatcagaaaatgtcataaaatgtattcttcattcaactgggaatatattcaggattaccaacaatgggaaagattcagtacatggattaggttatgcctggtcaccaccagtcctaaatgtgtctgtgggggacacagtggcatggcattggcaaacacatccgtttcttagagggataggatataggattttttctgtctccagtcctggaagtgtaatttatgatggcaaaggattcacaagtggaagacaaaaatctacatcaggttcattttcttaccaatttacttctcctggaatccattattatagcagcgggtatgttgatgaggctcactccatttttctccaaggagtcattaatgttttaccagctgaaaccagacacattcccttgcacctgtttgtgggtagctctgaagccacatatgcttatggaggacctgagaatttgcacttgggaagctctgtggcaggctgcctagcaacagaacccctgtgcagcctgaacaataccagggttaaaaattcaaaaagattgctatttgaggtttcaagttgtttttcaccatctataagcaacattactccgtccactggaacagtaaatgaactaataacaattattggacatggctttagtaatctcccatgggctaataaggttacaattggtagctacccctgtgtcgtagaagaaagtagtgaggattcaattacatgtcatattgaccctcaaaactcaatggatgttggtatcagggaaactgtcactttgactgtctacaacctgggcactgctatcaatacgttgtccaatgaatttgataggcgatttgtacttttgccaaacattgacctggtgttgccaaatgcaggatcaactacaggaatgacaagcgtgaccataaaaggctctggatttgccgtttcttctgcaggtgtaaaagtccttatgggtcatttcccatgtaaagttctatcagtgaattatacggccattgaatgtgaaacatcccctgctgcccaacagcttgtggatgtagatcttctaatacatggagtgcctgcccagtgccagggaaactgcaccttttcatacttagaaagcatcactccttacataacaggagtcttcccaaactctgtcataggatctgtaaaagttcttattgaaggagaaggtttggggactgttttggaggacattgctgttttcattggaaatcaacagttcagagcaatagaggttaatgaaaacaacatcactgctcttgtgactcctctcccagttggacatcattctgttagtgttgtggtgggaagtaaaggcttggctctgggaaacctgactgtcagcagccccccagtagcatctctatcaccaacttctggaagcattggtggtggaactacactggtgatcacaggaaatggcttctatccaggcaacactacagtcactattggggatgaaccttgtcaaattatttccatcaaccccaatgaagtctactgccgcactcccgctgggaccactggaatggtcgatgttaaaatctttgttaatacaattgcttatccacctttgctttttacatatgccctggaggatactccatttctcagaggaattatcccaagcagaggtccaccaggaactgaaattgagatcactggatccaactttggctttgagatcttggaaatctccgtgatgataaataacattcagtgtaatgtaaccatggccaatgatagtgtgttgcagtgcatcgtgggagatcatgctgggggcacatttcctgttatgatgcatcataagacaaaaggctcagccatgtccacagttgtatttgagtacccgcttaatattcaaaatattaatccaagccaaggtagtcataagtatgcaagaacctgcagatattttgtttcagtaaacacttatttagaaaccttatttagaaaataa

SEQ ID NO: 266 - protein, 2033 aa, Homo sapiens
MGHLWLLGIWGLCGLLLCAADPSTDGSQIIPKVTEIIPKYGSINGATRLTIRGEGFSQANQFNYGVDNAELGNSVQLISSFQSITCDVEKDASHSTQITCYTRAMPEDSYTVRVSVDGVPVTENNTCKGHINSWECTFNAKSFRTPTIRSITPLSGTPGTLITIQGRIFTDVYGSNIALSSNGKNVRILRVYIGGMPCELLIPQSDNLYGLKLDHPNGDMGSMVCKTTGTFIGHHNVSFILDNDYGRSFPQKMAYFVSSLNKIAMFQTYAEVTMIFPSQGSIRGGTTLTISGRFFDQTDFPVRVLVGGEPCDILNVTENSICCKTPPKPHILKTVYPGGRGLKLEVWNNSRPIRLEEILEYNEKTPGYMGASWVDSASYIWLMEQDTFVARFSGFLVAPDSDVYRFYIKGDDRYAIYFSQTGLPEDKVRIAYHSANANSYFSSPTQRSDDIHLQKGKEYYIEILLQEYRLSAFVDVGLYQYRNVYTEQQTGDAVNEEQVIKSQSTILQEVQVITLENWETTNAINEVQKIKVTSPCVEANSCSLYQYRLIYNMEKTVFLPADASEFILQSALNDLWSIKPDTVQVIRTQNPQSYVYMVTFISTRGDFDLLGYEVVEGNNVTLDITEQTKGKPNLETFTLNWDGIASKPLTLWSSEAEVQGAVEEMVSTKCPPQIANFEEGFVVKYFRDYETDFNLEHINRGQKTAETDAYCGRYSLKNPAVLFDSADVKPNRRPYGDILLFPYNQLCLAYKGFLANYIGLKFQYQDNSKITRSTDTQFTYNFAYGNNWTYTCIDLLDLVRTKYTGTNVSLQRISLHKASESQSFYVDVVYIGHTSTISTLDEMPKRRLPALANKGIFLEHFQVNQTKTNGPTMTNQYSVTMTSYNCSYNIPMMAVSFGQIITHETENEFVYRGNNWPGESKIRIQRIQAASPPLSGSFDIQAYGHILKGLPAAVSAADLQFALQSLEGMGRISVTREGTCAGYAWNIKWRSTCGKQNLLQINDSNIIGEKANMTVTRIKEGGLFRQHVLGDLLRTPSQQPQVEVYVNGIPAKCSGDCGFTWDSNITPLVLAISPSQGSYEEGTILTIVGSGFSPSSAVTVSVGPVGCSLLSVDEKELKCQILNGSAGHAPVAVSMADVGLAQNVGGEEFYFVYQSQISHIWPDSGSIAGGTLLTLSGFGFNENSKVLVGNEACNVIEGDLNRITCRTPKKTEGTVDISVTTNGFQATARDAFSYNCLQTPIITDFSPKVRTILGEVNLTIKGYNFGNELTQNMAVYVGGKTCQILHWNFTDIRCLLPKLSPGKHDIYVEVRNWGFASTRDKLNSSIQYVLEVTSMFPQRGSLFGGTEITIRGFGFSTIPAENTVLLGSIPCNVTSSSENVIKCILHSTGNIFRITNNGKDSVHGLGYAWSPPVLNVSVGDTVAWHWQTHPFLRGIGYRIFSVSSPGSVIYDGKGFTSGRQKSTSGSFSYQFTSPGIHYYSSGYVDEAHSIFLQGVINVLPAETRHIPLHLFVGSSEATYAYGGPENLHLGSSVAGCLATEPLCSLNNTRVKNSKRLLFEVSSCFSPSISNITPSTGTVNELITIIGHGFSNLPWANKVTIGSYPCVVEESSEDSITCHIDPQNSMDVGIRETVTLTVYNLGTAINTLSNEFDRRFVLLPNIDLVLPNAGSTTGMTSVTIKGSGFAVSSAGVKVLMGHFPCKVLSVNYTAIECETSPAAQQLVDVDLLIHGVPAQCQGNCTFSYLESITPYITGVFPNSVIGSVKVLIEGEGLGTVLEDIAVFIGNQQFRAIEVNENNITALVTPLPVGHHSVSVVVGSKGLALGNLTVSSPPVASLSPTSGSIGGGTTLVITGNGFYPGNTTVTIGDEPCQIISINPNEVYCRTPAGTTGMVDVKIFVNTIAYPPLLFTYALEDTPFLRGIIPSRGPPGTEIEITGSNFGFEILEISVMINNIQCNVTMANDSVLQCIVGDHAGGTFPVMMHHKTKGSAMSTVVFEYPLNIQNINPSQGSHKYARTCRYFVSVNTYLETLFRK

SEQ ID NO: 267 - DNA, 2100 bp, Homo sapiens
  CDS (1)...(2100)
atgggacacctgtggctcctgggtatttggggcctctgtgggctgctcctgtgtgccgcggatcccagcacagatggctctcaaataatccccaaagtcacagaaataatacctaaatatggcagtataaatggagcaacaaggctgactataagaggagaaggtttttctcaagcaaaccagtttaactatggagttgataacgctgagttgggaaacagtgtgcaattaatttcttctttccagtcaattacttgtgatgtagaaaaagatgcaagtcattcaactcaaattacatgctatactagagcaatgccggaagattcctacactgttagagtcagtgtggacggggttcctgttacggaaaataacacctgcaaaggtcacatcaacagctgggaatgtaccttcaacgcaaaaagttttagaaccccaacaataagaagcatcacacctttatctggaactccaggtacactaataacaatccaaggcagaatcttcactgatgtctatggaagtaatattgcactaagctcaaatgggaaaaatgttaggattttgagagtttacattggaggaatgccctgtgagcttctcataccacaatctgataatttatatggtctaaaactggatcatccaaatggagatatgggttctatggtttgtaagacgactggaacttttattggtcatcacaatgtcagcttcatcttagataatgattatgggaggagttttccacagaaaatggcatattttgtttcttctctcaataaaattgcaatgtttcaaacatatgcagaggtcaccatgattttcccttcacaaggaagcattcgaggtggcaccacgctgacaataagtgggcgtttctttgatcagacagatttccccgtcagagttctagttggaggtgaaccttgtgatattttgaatgtcacagaaaatagtatatgttgcaagacaccccccaaacctcatattctcaaaactgtatatccaggagggagaggcctgaagcttgaggtgtggaataatagccgtccaatacgtttggaagagatactggaatacaatgaaaaaacgcctgggtacatgggtgccagttgggtagattcagcttcctatatttggctcatggaacaagacacatttgttgcacgctttagtggatttttggtggctccagattctgatgtttatagattctacatcaaaggtgatgaccgttatgctatttattttagccagactggacttccagaagataaggtgaggattgcatatcattctgctaatgccaacagttatttttccagtccaacacaaagatcagatgatattcatctgcagaaaggaaaagaatactatattgaaatcttgctgcaggagtatagattaagtgcatttgttgatgttggactgtaccagtatcgaaatgtttatactgaacaacaaacaggagatgcagtgaatgaagaacaagttatcaaatcccagtcgacaatcctccaggaagtacaggttataacattggaaaactgggaaacaactaatgcaattaatgaggttcagaagatcaaggtaaccagcccatgtgtggaagctaattcatgttcactttaccaatatagattaatctataatatggaaaaaactgtcttcctacctgctgatgcttctgaattcatactgcaatcagccttgaatgacctctggtctataaaaccggacacagttcaagtaataagaacacaaaatccccagagctatgtctacatggtaacattcatatcaactagaggagactttgatctgcttggttatgaagtagttgaagggaataatgtcacactggatattacagaacaaaccaaaggaaaacccaacttggagacattcacactgaattgggatgggatcgcttctaagccactcactctatggtcatcagaagctgaagtacggtgtaggaatgtttctaccacgcattttccctgcaccctctcacatcattcatgggccatttgtagacagatgggaaagagatgttacttcaaaaaaaatcactgcaaattatttatcacctga

SEQ ID NO: 268 - protein, 699 aa, Homo sapiens
MGHLWLLGIWGLCGLLLCAADPSTDGSQIIPKVTEIIPKYGSINGATRLTIRGEGFSQANQFNYGVDNAELGNSVQLISSFQSITCDVEKDASHSTQITCYTRAMPEDSYTVRVSVDGVPVTENNTCKGHINSWECTFNAKSFRTPTIRSITPLSGTPGTLITIQGRIFTDVYGSNIALSSNGKNVRILRVYIGGMPCELLIPQSDNLYGLKLDHPNGDMGSMVCKTTGTFIGHHNVSFILDNDYGRSFPQKMAYFVSSLNKIAMFQTYAEVTMIFPSQGSIRGGTTLTISGRFFDQTDFPVRVLVGGEPCDILNVTENSICCKTPPKPHILKTVYPGGRGLKLEVWNNSRPIRLEEILEYNEKTPGYMGASWVDSASYIWLMEQDTFVARFSGFLVAPDSDVYRFYIKGDDRYAIYFSQTGLPEDKVRIAYHSANANSYFSSPTQRSDDIHLQKGKEYYIEILLQEYRLSAFVDVGLYQYRNVYTEQQTGDAVNEEQVIKSQSTILQEVQVITLENWETTNAINEVQKIKVTSPCVEANSCSLYQYRLIYNMEKTVFLPADASEFILQSALNDLWSIKPDTVQVIRTQNPQSYVYMVTFISTRGDFDLLGYEVVEGNNVTLDITEQTKGKPNLETFTLNWDGIASKPLTLWSSEAEVRCRNVSTTHFPCTLSHHSWAICRQMGKRCYFKKNHCKLFIT

SEQ ID NO: 269 - DNA, 5331 bp, Homo sapiens
  CDS (1)...(5331)
atgggacacctgtggctcctgggtatttggggcctctgtgggctgctcctgtgtgccgcggatcccagcacagatggctctcaaataatccccaaagtcacagaaataatacctaaatatggcagtataaatggagcaacaaggctgactataagaggagaaggtttttctcaagcaaaccagtttaactatggagttgataacgctgagttgggaaacagtgtgcaattaatttcttctttccagtcaattacttgtgatgtagaaaaagatgcaagtcattcaactcaaattacatgctatactagagcaatgccggaagattcctacactgttagagtcagtgtggacggggttcctgttacggaaaataacacctgcaaaggtcacatcaacagctgggaatgtaccttcaacgcaaaaagttttagaaccccaacaataagaagcatcacacctttatctggaactccaggtacactaataacaatccaaggcagaatcttcactgatgtctatggaagtaatattgcactaagctcaaatgggaaaaatgttaggattttgagagtttacattggaggaatgccctgtgagcttctcataccacaatctgataatttatatggtctaaaactggatcatccaaatggagatatgggttctatggtttgtaagacgactggaacttttattggtcatcacaatgtcagcttcatcttagataatgattatgggaggagttttccacagaaaatggcatattttgtttcttctctcaataaaattgcaatgtttcaaacatatgcagaggtcaccatgattttcccttcacaaggaagcattcgaggtggcaccacgctgacaataagtgggcgtttctttgatcagacagatttccccgtcagagttctagttggaggtgaaccttgtgatattttgaatgtcacagaaaatagtatatgttgcaagacaccccccaaacctcatattctcaaaactgtatatccaggagggagaggcctgaagcttgaggtgtggaataatagccgtccaatacgtttggaagagatactggaatacaatgaaaaaacgcctgggtacatgggtgccagttgggtagattcagcttcctatatttggctcatggaacaagacacatttgttgcacgctttagtggatttttggtggctccagattctgatgtttatagattctacatcaaaggtgatgaccgttatgctatttattttagccagactggacttccagaagataaggtgaggattgcatatcattctgctaatgccaacagttatttttccagtccaacacaaagatcagatgatattcatctgcagaaaggaaaagaatactatattgaaatcttgctgcaggagtatagattaagtgcatttgttgatgttggactgtaccagtatcgaaatgtttatactgaacaacaaacaggagatgcagtgaatgaagaacaagttatcaaatcccagtcgacaatcctccaggaagtacaggttataacattggaaaactgggaaacaactaatgcaattaatgaggttcagaagatcaaggtaaccagcccatgtgtggaagctaattcatgttcactttaccaatatagattaatctataatatggaaaaaactgtcttcctacctgctgatgcttctgaattcatactgcaatcagccttgaatgacctctggtctataaaaccggacacagttcaagtaataagaacacaaaatccccagagctatgtctacatggtaacattcatatcaactagaggagactttgatctgcttggttatgaagtagttgaagggaataatgtcacactggatattacagaacaaaccaaaggaaaacccaacttggagacattcacactgaattgggatgggatcgcttctaagccactcactctatggtcatcagaagctgaagttcagggagcagtggaagaaatggttagcactaagtgtccaccacaaattgcaaattttgaagaaggatttgttgtgaaatatttcagagactatgaaactgattttaatctggaacatattaacagagggcagaagacagctgaaaccgatgcttactgtggtcgttattccctgaaaaacccagctgttctttttgactcagcagatgttaaaccaaacagacgaccatatggagatattttattgtttccttataatcagttatgtttagcatacaaaggattcctggcaaattatattggtctaaaatttcagtaccaagacaatagcaagattactagaagcactgatacacagtttacatacaactttgcttatggaaacaactggacttacacttgcatagaccttctggatctcgtaagaacgaaatacactgggacaaatgtttctcttcagaggattagcttacataaagcatcagaatcacagtccttctatgtggatgtagtgtacattggacacacatctacaatctcaacattggatgaaatgcccaagagaagacttcctgcattagcaaataaaggaatattcttagagcactttcaggtgaatcagaccaaaacaaatgggccaactatgacaaaccaatattctgttaccatgacttcatacaattgcagttacaatatacccatgatggctgtgagctttgggcagataatcacacatgagacagagaacgagtttgtctacagaggaaataattggccaggcgagtcaaaaattcgtattcaaagaattcaagctgcatctccacctctaagtggcagctttgacattcaagcttatggacatattcttaaaggcctccccgctgctgtgtcagctgcagatctgcagtttgcactccagagtctggagggaatgggaagaatctcagttacacgagagggaacctgtgctggctacgcgtggaacatcaaatggagaagcacctgcggaaagcagaatcttctacagattaatgattccaacattattggagaaaaggctaatatgacagttacaaggataaaggaaggtggcttattcagacaacatgtacttggagacctacttcgtacacccagtcaacagccacaggttgaagtctatgtcaatggaattccagctaaatgttcaggtgactgtggatttacatgggattccaacattactcccctagtcttggcgataagcccttctcaagggtcctatgaagaaggcacaattctaaccatagtgggttctggattttctcctagttcagctgtaacagtctcagttggaccagtaggttgttctcttctttctgtggatgaaaaagagctcaagtgccagattctgaatggaagtgctggacatgcccccgttgctgtgtccatggctgatgttggactagcacagaatgtagggggtgaagagttctactttgtttatcagagtcagatctcacatatctggcctgattctggaagcatagcaggtggtactctactgactttatctggatttggctttaatgaaaattcaaaggtattagttggaaatgaagcctgcaatgtgattgaaggggatttgaataggataacctgcaggacaccaaaaaaaactgagggtacagttgatatttcagttactaccaatggatttcaagccacagcaagggatgcttttagttataattgtttacagacaccaattataactgattttagtccaaaagtacgaacaatactaggagaagttaatttaacaattaagggctataattttggaaatgaactcacacaaaacatggcggtgtatgttggaggaaaaacctgccagattcttcactggaacttcacagatattagatgccttttgcccaagttgtctcctggaaaacatgatatctatgtagaagtcagaaactggggttttgcatcaacaagagacaaattaaattcttcaatacagtatgttttagaagtgaccagcatgtttccacaaagaggctccttgtttggtggaactgaaatcaccataaggggttttggattcagcacaataccagctgagaataccgtgctgttagggtccatcccttgcaatgttacatcatcatcagaaaatgtcataaaatgtattcttcattcaactgggaatatattcaggattaccaacaatgggaaagattcagtacatggattaggttatgcctggtcaccaccagtcctaaatgtgtctgtgggggacacagtggcatggcattggcaaacacatccgtttcttagagggataggatataggattttttctgtctccagtcctggaagtgtaatttatgatggcaaaggattcacaagtggaagacaaaaatctacatcaggttcattttcttaccaatttacttctcctggaatccattattatagcagcgggtatgttgatgaggctcactccatttttctccaaggagtcattaatgttttaccagctgaaaccagacacattcccttgcacctgtttgtgggtagctctgaagccacatatgcttatggaggacctgagaatttgcacttgggaagctctgtggcaggctgcctagcaacagaacccctgtgcagcctgaacaataccagggttaaaaattcaaaaagattgctatttgaggtttcaagttgtttttcaccatctataagcaacattactccgtccactggaacagtaaatgaactaataacaattattggacatggctttagtaatctcccatgggctaataaggttacaattggtagctacccctgtgtcgtagaagaaagtagtgaggattcaattacatgtcatattgaccctcaaaactcaatggatgttggtatcagggaaactgtcactttgactgtctacaacctgggcactgctatcaatacgttgtccaatgaatttgataggcgatttgtacttttgccaaacattgacctggtgttgccaaatgcaggatcaactacaggaatgacaagcgtgaccataaaaggctctggatttgccgtttcttctgcaggtgtaaaagtccttatgggtcatttcccatgtaaagttctatcagtgaattatacggccattgaatgtgaaacatcccctgctgcccaacagcttgtggatgtagatcttctaatacatggagtgcctgcccagtgccagggaaactgcaccttttcatacttagaaagcatcactccttacataacaggagtcttcccaaactctgtcataggatctgtaaaagttcttattgaaggagaaggtttggggactgttttgtag

SEQ ID NO: 270 - protein, 1776 aa, Homo sapiens
MGHLWLLGIWGLCGLLLCAADPSTDGSQIIPKVTEIIPKYGSINGATRLTIRGEGFSQANQFNYGVDNAELGNSVQLISSFQSITCDVEKDASHSTQITCYTRAMPEDSYTVRVSVDGVPVTENNTCKGHINSWECTFNAKSFRTPTIRSITPLSGTPGTLITIQGRIFTDVYGSNIALSSNGKNVRILRVYIGGMPCELLIPQSDNLYGLKLDHPNGDMGSMVCKTTGTFIGHHNVSFILDNDYGRSFPQKMAYFVSSLNKIAMFQTYAEVTMIFPSQGSIRGGTTLTISGRFFDQTDFPVRVLVGGEPCDILNVTENSICCKTPPKPHILKTVYPGGRGLKLEVWNNSRPIRLEEILEYNEKTPGYMGASWVDSASYIWLMEQDTFVARFSGFLVAPDSDVYRFYIKGDDRYAIYFSQTGLPEDKVRIAYHSANANSYFSSPTQRSDDIHLQKGKEYYIEILLQEYRLSAFVDVGLYQYRNVYTEQQTGDAVNEEQVIKSQSTILQEVQVITLENWETTNAINEVQKIKVTSPCVEANSCSLYQYRLIYNMEKTVFLPADASEFILQSALNDLWSIKPDTVQVIRTQNPQSYVYMVTFISTRGDFDLLGYEVVEGNNVTLDITEQTKGKPNLETFTLNWDGIASKPLTLWSSEAEVQGAVEEMVSTKCPPQIANFEEGFVVKYFRDYETDFNLEHINRGQKTAETDAYCGRYSLKNPAVLFDSADVKPNRRPYGDILLFPYNQLCLAYKGFLANYIGLKFQYQDNSKITRSTDTQFTYNFAYGNNWTYTCIDLLDLVRTKYTGTNVSLQRISLHKASESQSFYVDVVYIGHTSTISTLDEMPKRRLPALANKGIFLEHFQVNQTKTNGPTMTNQYSVTMTSYNCSYNIPMMAVSFGQIITHETENEFVYRGNNWPGESKIRIQRIQAASPPLSGSFDIQAYGHILKGLPAAVSAADLQFALQSLEGMGRISVTREGTCAGYAWNIKWRSTCGKQNLLQINDSNIIGEKANMTVTRIKEGGLFRQHVLGDLLRTPSQQPQVEVYVNGIPAKCSGDCGFTWDSNITPLVLAISPSQGSYEEGTILTIVGSGFSPSSAVTVSVGPVGCSLLSVDEKELKCQILNGSAGHAPVAVSMADVGLAQNVGGEEFYFVYQSQISHIWPDSGSIAGGTLLTLSGFGFNENSKVLVGNEACNVIEGDLNRITCRTPKKTEGTVDISVTTNGFQATARDAFSYNCLQTPIITDFSPKVRTILGEVNLTIKGYNFGNELTQNMAVYVGGKTCQILHWNFTDIRCLLPKLSPGKHDIYVEVRNWGFASTRDKLNSSIQYVLEVTSMFPQRGSLFGGTEITIRGFGFSTIPAENTVLLGSIPCNVTSSSENVIKCILHSTGNIFRITNNGKDSVHGLGYAWSPPVLNVSVGDTVAWHWQTHPFLRGIGYRIFSVSSPGSVIYDGKGFTSGRQKSTSGSFSYQFTSPGIHYYSSGYVDEAHSIFLQGVINVLPAETRHIPLHLFVGSSEATYAYGGPENLHLGSSVAGCLATEPLCSLNNTRVKNSKRLLFEVSSCFSPSISNITPSTGTVNELITIIGHGFSNLPWANKVTIGSYPCVVEESSEDSITCHIDPQNSMDVGIRETVTLTVYNLGTAINTLSNEFDRRFVLLPNIDLVLPNAGSTTGMTSVTIKGSGFAVSSAGVKVLMGHFPCKVLSVNYTAIECETSPAAQQLVDVDLLIHGVPAQCQGNCTFSYLESITPYITGVFPNSVIGSVKVLIEGEGLGTVL
